(19) United States
(12) Patent Application Publication
(10) Pub. No.: US 2014/0274741 A1
(43) Pub. Date: Sep. 18, 2014

(54) METHODS TO CAPTURE AND SEQUENCE LARGE FRAGMENTS OF DNA AND DIAGNOSTIC METHODS FOR NEUROMUSCULAR DISEASE

(71) Applicant: The Translational Genomics Research Institute, Phoenix, AZ (US)

(72) Inventors: Jesse M. Hunter, Phoenix, AZ (US); Lisa Baumbach-Reardon, Phoenix, AZ (US)

(73) Assignee: The Translational Genomics Research Institute, Phoenix, AZ (US)

(21) Appl. No.: 14/217,266

(22) Filed: Mar. 17, 2014

Related U.S. Application Data
(60) Provisional application No. 61/791,405, filed on Mar. 15, 2013.

(51) Int. Cl. C12Q 1/68

(52) U.S. Cl. CPC C12Q 1/6874; C12Q 1/6883
USPC 506/2

(57) ABSTRACT

The present invention provides methods of sequencing a large fragment of DNA by hybridizing a set of specifically designed probes to the DNA, shearing the DNA, and sequencing the DNA with Next Generation Sequencing. The probes are designed to target genes of interest at intervals to allow the capture of relatively large DNA fragments. The present invention also provides methods of diagnosing a neuromuscular disease (NMD) comprising detecting mutations in one or more of SCML2, CHRND, OFD1, DYNC1H1, COL6A3, EMD, ARHGAP4, FLNA, MID1IP1, MID1, and CFP.

### CROSS-REFERENCE TO RELATED APPLICATIONS

[0001] The present application claims priority to U.S. Application No. 61/791,405, filed Mar. 15, 2013, the entire contents and disclosure of which are herein incorporated by reference thereto.

### INCORPORATION-BY-REFERENCE OF MATERIAL ELECTRONICALLY FILED

[0002] Incorporated by reference in its entirety herein is a computer-readable nucleotide/amino acid sequence listing submitted concurrently herewith and identified as follows: One 1,231,079 byte ASCII (text) file named “Seq_List” created on Mar. 17, 2014.

### TECHNICAL FIELD

[0003] The present invention relates to comprehensive genetic testing and discovery of novel mutations for diseases including neuromuscular diseases. The invention also provides methods of diagnosing neuromuscular disease by detecting genetic mutations in biological samples.

### BACKGROUND

[0004] There are many types of rare genetic disorders. In order to make an accurate genetic diagnosis of the cause of disease, genetic testing must be done. There are many types of genetic testing. While sequencing genes, known disease causing mutations can be identified. More importantly, new disease causing mutations can be discovered. Discovery of new mutations that lead to disease can uncover critical knowledge important for testing for the disease and discovering, developing, and administering treatment for the disease and even for unrelated disease. There is a need for more effective methods of capturing DNA from patient samples and sequencing selected regions to identify and discover mutations leading to disease.

[0005] Spinal muscular atrophies (SMA) are a group of rare inherited disorders characterized by degeneration of lower motor neurons. Motor neurons are the biological wires that connect the spinal cord to muscles. Motor neurons control our voluntary and involuntary muscles, and loss of motor neurons impairs the communication between the brain and muscles resulting in muscle weakness (hypotonia) and atrophy, the primary clinical feature of SMA. With SMA, muscle weakness (hypotonia) usually appears in early childhood and is often apparent at birth. When a child has symptoms of SMA, genetic testing for mutations in the SMN1 gene (the only clinically available test available in the U.S.) accounts for 70-80% of SMA. However, for the other 20-30% of SMA patients who do not have mutations in SMN1, the genetic cause of their disease often remains undiagnosed due to the lack of a clinical test. The heterogeneous etiology of genetic alterations that can result in clinical manifestations of hypotonia has only recently been appreciated. There is a pressing need for accurate and effective methods to identify the genetic mutations causing this and other diseases. Such methods would increase the chances for early diagnosis and better therapeutic treatment of such disease.

### SUMMARY

[0006] The present invention provides a method of sequencing a large fragment of DNA, the method comprising a) isolating genomic DNA from a biological sample; b) hybridizing the genomic DNA with a set of probes to form genomic DNA-probe complexes, wherein the set of probes targets sequences across the large fragment of DNA at intervals; c) purifying the genomic DNA from the complexes with affinity chromatography; d) shearing the genomic DNA to produce small fragments of DNA, wherein the small fragments of DNA comprise coding and non-coding sequences from the large fragment of DNA; and e) sequencing the small fragments of DNA with Next Generation Sequencing (NGS) to obtain the sequence of the large fragment of DNA.

[0007] The present invention also provides a method of sequencing a large fragment of DNA, the method comprising a) isolating genomic DNA from a biological sample; b) hybridizing the genomic DNA with a first set of probes to form genomic DNA-probe complexes with a portion of the genomic DNA encoding a pseudogene, wherein the set of probes targets sequences across the pseudogene at intervals; c) removing the portion of the genomic DNA encoding the pseudogene with affinity chromatography; d) hybridizing the genomic DNA with a second set of probes to form genomic DNA-probe complexes, wherein the second set of probes targets sequences across the large fragment of DNA at intervals; e) purifying the genomic DNA from the complexes with affinity chromatography; f) shearing the genomic DNA to produce small fragments of DNA, wherein the small fragments of DNA comprise coding and non-coding sequences from the large fragment of DNA; and g) sequencing the small fragments of DNA with Next Generation Sequencing (NGS) to obtain the sequence of the large fragment of DNA.

[0008] In some embodiments, the large fragment of DNA includes at least one gene. The pseudogene and the at least one gene may share at least 60%, 70%, 80%, or 90% sequence homology. In certain aspects, the series of probes target intervals across the pseudogene and/or the large fragment of DNA of about 500 bp to about 5,000 bp. In other aspects, the large fragment of DNA comprises at least 1 gene, at least 5 genes, at least 25 genes, at least 50 genes, at least 100 genes, at least 150 genes, at least 200 genes, or at least 250 genes.

[0009] In another embodiment, the present invention provides a method of diagnosing a neuromuscular disease (NMD) in a subject, the method comprising a) obtaining a biological sample from the subject; b) isolating genomic DNA from the biological sample; c) sequencing in the genomic DNA at least one gene selected from the group consisting of SCML2, CHRND, OFD1, DYNC1H1, COL6A3, EMD, ARHGAP4, FLNA, MID1IP1, MID1, and CFP; and d) diagnosing NMD in the subject if there is a mutation in the at least one gene. The mutation may be any one of ASN76SER in SCML2, MET1VAL start loss in SCML2, ASP161ASN in CHRND, 1 DNA base pair frameshift deletion at genomic position chromosome 2 position 233398958 in CHRND, GLU958LYS in OFD1, TRP1208LEU in DYNC1H1, LYS2483GLU in COL6A3, a DNA substitution of G to T at the splice junction of EMD at genomic position chromosome X position 153608155, PRO635LEU in ARHGAP4, VAL584LEU in FLNA, ARG655HIS in FLNA, ASP51ASN in MID1IP1, PRO667LEU in MID1, and CYS337TYR in CFP. In certain aspects, the method further comprises administering an effective amount of a therapeutic agent to the subject diagnosed with an NMD.

### BRIEF DESCRIPTION OF THE DRAWINGS

[0010] Illustrative and exemplary embodiments of the invention are shown in the drawings in which:

[0011] FIG. 1 shows the steps involved in standard fragment capture versus large fragment capture and underscores the advantages of lower cost and greater sequencing coverage available with large fragment capture.

[0012] FIG. 2 shows high confidence variants identified in patients suffering from various forms of neuromuscular disease.

[0013] FIG. 3 shows low confidence best candidate variants identified in patients suffering from various forms of neuromuscular disease.

### DETAILED DESCRIPTION

[0014] As used herein, the term “neuromuscular disease” or “NMD” means any disorder that results in a loss of muscle function. Loss of muscle function can be a result of disruption of the cellular and biological function or structure of muscle tissue or the loss of nervous system function that controls muscle function. Nervous system defects include loss of central nervous system function controlling muscle movements, spinal neuron dysfunction, spinal motor neuron dysfunction, or neuromuscular junctions. Nervous system defects can also result from loss of glial cell function that supports neuronal function.

[0015] As used herein, the term “variant” means a DNA base that differs between two people

[0016] The term “mutation” means a variant (generally very rare in the population) that is the genetic cause of a disease.

[0017] As used herein, a “pseudogene” is section of genomic DNA that is an imperfect copy of a functional gene and has lost its protein-coding ability or is otherwise no longer expressed in the cell. A pseudogene may have a high degree of homology or identity to its functional counterpart. In some aspects, the method of the present invention comprises hybridizing the genomic DNA with a first set of probes to form genomic DNA-probe complexes with a portion of the genomic DNA encoding a pseudogene, wherein the set of probes targets sequences across the pseudogene at intervals. In some embodiments, the pseudogene shares at least 60%, at least 65%, at least 70%, at least 75%, at least 80%, at least 85%, at least 90%, or at least 95% homology with a functional gene. In other embodiments, the pseudogene shares at least 40%, at least 45%, at least 50%, at least 55%, at least 60%, at least 65%, at least 70%, at least 75%, at least 80%, at least 85%, at least 90%, or at least 95% identity with a functional gene.

[0018] The present invention relates to a neuromuscular disease (NMD) gene capture panel and large fragment capture techniques. The disclosed large fragment capture techniques confer unique advantages that are not available with standard exome capture and sequencing techniques.

[0019] In one embodiment, panels of genes (e.g., NMD genes) are used to develop unique capture probes for these genes. These capture probes are designed in a unique way in that probes are spaced at equal intervals across the entirety of each gene. In one aspect, the spacing between probes is about 500 bp to about 5000 bp, e.g., about 500 bp and another about 2000 bp. In certain specific embodiments, interval is optimized to create the greatest capture efficiency. These unique probes are used in a novel capture process where large fragments of DNA are captured.

[0020] There are several benefits to capturing large DNA fragments:
[0021] 1) Fewer probes can be used to capture sequences of interest decreasing the cost of generating capture probes compared to current techniques that have little or no spacing between probes and even overlap to a large extent.
[0022] 2) Capture of large continuous fragments is more amenable to identifying allelic variants (phasing) and may be more amenable to newer sequencing technologies being developed where large continuous fragments are needed for sequencing.
[0023] 3) Capture efficiency is increased by having multiple probes attached to a single piece of DNA.
[0024] 4) All regions of the entire gene will be sequenced rather than just the coding regions of the gene.

[0025] To further explain these advantages, current capture techniques are designed to have one probe hybridize to one short segment of DNA that is subsequently captured by an affinity interaction such as a streptavidin interaction. The capture technique of the present invention is designed to have multiple probes for one large segment of DNA. While not wishing to be bound by any theory, it is thought that having multiple probes hybridized to one large DNA fragment should increase affinity interaction because the affinity interactions are “quasi intramolecular” interactions rather than independent affinity interactions.

[0026] While most disease causing mutations are found in coding regions, some mutations are found in intronic regions. These intronic mutations cannot be identified by exome sequencing and can only be identified by whole genome sequencing. Intronic mutations such as inversions, translocations, and deletions can be just as damaging as coding mutations.

[0027] In some embodiments, probes to mitochondrial genes are excluded from the probe design because mitochondrial DNA is so prevalent that it unavoidably contaminates all sequencing techniques currently available resulting in sequencing of the entire mitochondrial genome regardless of capture and sequencing techniques used. In other embodiments, probes to these mitochondrial genes are included in the panel.

[0028] To further explain the advantages of the present invention, a custom gene capture and sequencing panel (e.g., for sequencing NMD genes) costs about the same amount as sequencing a whole exome. It provides a benefit to patients that cannot be obtained by whole exome sequencing as described above. The panel can be also be used in conjunction with whole exome sequencing or whole genome sequencing if desired, but with increased coverage of NMD genes.

[0029] In certain embodiments, the present invention allows for the exclusion of pseudogenes in targeted sequencing. Just as selective capture of large fragments can be used to distinguish between closely related gene sequences, this same technique can be adapted to preferentially remove pseudogene sequences. Pseudogenes are inactive genes that share very high homology with functional genes. This homology results in decreased alignment efficiencies and false positive variant calls. There are thousands of pseudogenes decreasing the ability to identify disease causing variants in many hundreds of genes from targeted panel sequencing, whole exome sequencing, and whole genome sequencing results. This approach is applicable for sequencing genes involved in any disease.

[0030] The present invention allows for the capture of a comprehensive list of genes. Overlap between clinical phenotype generally does not allow for sufficient information for a physician to successfully choose which gene or small panel of genes is the correct one to sequence to identify the disease causing mutation. Whole exome sequencing allows for the analysis of many genes, but only for exons. Whole genome sequencing covers introns and exons, but at much higher cost. The largest panels that have been previously analyzed are about 20-200 genes. By making it much more likely for a disease causing gene to be discovered by using such a large comprehensive panel, the present invention provides a significant advantage over other techniques. The present invention also allows for the capturing of a relatively large set of complete genes with relatively few probes.

[0031] In some embodiments, the large fragment of DNA comprises at least 1 gene, at least 5 genes, at least 25 genes, at least 50 genes, at least 100 genes, at least 150 genes, at least 200 genes, or at least 250 genes.

[0032] The term “sample” as used herein means a sample of biological tissue or fluid or an excretion sample that comprises nucleic acids. Such samples include, but are not limited to, tissue or fluid isolated from subjects. Biological samples may also include sections of tissues such as biopsy and autopsy samples, frozen sections, formalin fixed and paraffin embedded tissue samples, blood, plasma, serum, sputum, stool and mucus. Biological sample also refers to metastatic tissue obtained from, but not limited to, organs such as liver, lung, and peritoneum. Biological samples also include explants and primary and/or transformed cell cultures derived from animal or patient tissues. Biological samples may also be blood, a blood fraction, gastrointestinal secretions, or tissue sample. A biological sample may be provided by removing a sample of cells from an animal, but can also be accomplished by using previously isolated cells (e.g., isolated by another person, at another time, and/or for another purpose), or by performing the methods described herein in vivo. Archival tissues, such as those having treatment or outcome history, may also be used.

[0033] As used herein, a “sample” or “biological sample” refers to a sample of biological tissue, fluid or excretion that comprises nucleic acids (e.g., mRNA). It should be noted that a “biological sample obtained from the subject” may also optionally comprise a sample that has not been physically removed from the subject. In some embodiments the sample obtained from the subject is a body fluid or excretion sample including but not limited to seminal plasma, blood, serum, urine, prostatic fluid, seminal fluid, semen, the external secretions of the skin, respiratory, intestinal, and genitourinary tracts, tears, cerebrospinal fluid, sputum, saliva, milk, peritoneal fluid, pleural fluid, peritoneal fluid, cyst fluid, lavage of body cavities, broncho alveolar lavage, lavage of the reproductive system and/or lavage of any other organ of the body or system in the body, and stool.

[0034] Numerous well known tissue or fluid collection methods can be utilized to collect the biological sample from the subject in order to determine the expression level of the biomarkers of the invention in said sample of said subject.

[0035] Examples include, but are not limited to, blood sampling, urine sampling, stool sampling, sputum sampling, aspiration of pleural or peritoneal fluids, fine needle biopsy, needle biopsy, core needle biopsy and surgical biopsy, and lavage. Regardless of the procedure employed, once a biopsy/sample is obtained the level of the biomarkers can be determined and a diagnosis can thus be made. Tissue samples are optionally homogenized by standard techniques e.g. sonication, mechanical disruption or chemical lysis. Tissue section preparation for surgical pathology can be frozen and prepared using standard techniques. In situ hybridization assays on tissue sections are performed in fixed cells and/or tissues.

[0036] In a one embodiment, blood is used as the biological sample. If that is the case, the cells comprised therein can be isolated from the blood sample by centrifugation, for example.

[0037] In certain aspects, the methods of the present invention use commercially available reagents and resources. However, the unique ordering of the steps and the reduced number of probes required to capture DNA regions of interest confer superior advantages over know methods of DNA capture and sequencing.

[0038] In certain aspects, the present invention encompasses the design of probes specific to genes of interest. The beginning and end coordinates of each gene of interest (for example, in the case of NMD genes totaling 1387 gene regions) can be obtained from available online databases. Genes that overlap or that are within 1000 bp of each other are merged into single regions. The total size (in base pairs) of all regions is summed then divided by the number of probes desired resulting in the interprobe distance. Each region is then divided by the interprobe distance to determine the number of probes for that region. Coordinates for probes are calculated based on beginning and end coordinates for each region and the interprobe distance. In some embodiments, probes are designed and manufactured using Agilent's SureDesign web based tool and ordered from Agilent. Other probe design software and probe manufactures may also be used.

[0039] In certain aspects, large fragment capture comprises the following steps in the order shown:

[0040] 1. DNA Isolation

[0041] Genomic DNA is obtained by standard isolation methods. These standard methods generally result in DNA of ˜10 kb to ˜100 kb in length. In some embodiments, the DNA may be sheared to produce somewhat smaller fragments.

[0042] 2. DNA Capture

[0043] DNA is mixed with the custom probes described herein along with buffers commercially available for DNA capture. Fragments are incubated with standard temperature gradient protocols for hybridization of probes to DNA. Capture DNA is then mixed with capture beads commercially available and washed with buffers commercially available. Captured fragments are eluted and DNA size determined by standard bioanalyzer trace methods.

[0044] 3. Shearing

[0045] Captured DNA fragments will then be sheared using mechanical or acoustic shearing instruments to sizes appropriate for the sequencing technology used for next generation sequencing (NGS). One method of sequencing is with an Illumina HiSeq instrument that requires 100-1000 bp fragments for sequencing. Newer sequencing technologies may require large fragments.

[0046] 4. DNA Sequencing and Analysis

[0047] After shearing, DNA must be end-repaired and sequencing adapters ligated for currently available sequencing technologies. Standard reagents and protocols are available for this step. DNA is then sequenced. Sequencing results are aligned and genome coverage determined. Comparison between coverage of the targeted genes will be compared to coverage across the whole genome is done to demonstrate that the method with fewer probes and large fragments captured results in complete coverage the genes targeted.

[0048] The spacing between probes may alter capture efficiency due to the flexibility or rigidity of DNA and the secondary structure of the DNA that forms between probes. Probe spacing is required for multi intramolecular capture interactions to occur as probes are 80-120 bp in length in certain embodiments. In certain aspects, spacing between probes varies between 200 and 10,000 bp. In a preferred embodiment, spacing between probes is about 2000 bp.

[0049] When DNA is prepared or sheared, the ends of the DNA do not break evenly leaving overhangs of single stranded DNA. These overhangs may interfere with efficient capture as they may hybridize differently with probes. In some embodiments, the method further comprises performing end-repair after DNA isolation and before capture.

[0050] In some embodiments, DNA fragments of different size are generated for comparison of capture efficiency. Un-sheared DNA (˜10 Kb to 100 kb fragments), and DNA that has been sheared to various sizes such as ˜25 kb, ˜10 kb, ˜5 kb, ˜2 Kb, and the standard ˜200 bp fragment size may be used. The size of genomic DNA fragments may be determined by electrophoresis in an agarose gel according to standard methods and protocols.

[0051] In certain aspects, the present invention involves using large fragment capture to remove pseudogene sequences. The human genome contains about 22,000 actively transcribed and functional genes. In addition to these active genes, the human genome also contains thousands of pseudogenes. These are DNA sequences that resemble functional genes and have high homology to functional genes, but lack sequences to make them active genes. The similarity between functional genes and pseudogenes creates difficulty in capture efficiency and sequence alignment. Large fragment capture can be used to alleviate this challenge. In order for good discrimination between pseudogenes and active genes, probes must target regions with ˜30 bp different. Since homology is high between pseudogenes and their active counterparts, current small fragment capture methods requiring many overlapping probes cannot be designed to discriminate between pseudogenes and active genes at those homologous regions. With large fragment capture, probes can be designed to only unique pseudogene regions in comparison to their active gene counterparts. These probes can then be used to capture and remove large regions that extend into the homologous areas where distinguishing probes cannot be designed. Using such a design, entire pseudogenes can be selectively removed, leaving only active genes for sequencing. Alignment is improved as only sequences to active genes remain.

[0052] In another aspect, the present invention relates to using large fragment capture for genes of interest with high homology. Just as pseudogenes have high homology to functionally active genes, some active gene families have high homology between them. The same large fragment capture technique can be used to specifically capture genes that have large regions with high homology to other DNA sequences since probes can be designed to only regions with sufficient sequence differences yet capture the entire gene.

[0053] In some embodiments, the step of isolating genomic DNA from a biological sample results in the breaking of the genomic DNA into fragments of about 10 kb to about 100 kb, e.g., any range within about 10 kb to about 100 kb, such as about 10 kb to about 20 kb, about 10 kb to about 50 kb, about 10 kb to about 80 kb, about 20 kb to about 80 kb, about 40 kb to about 60 kb, etc. In certain aspects, the step of isolating genomic DNA from a biological sample comprises shearing the genomic DNA into fragments of about 2,000 bp to about 10,000 bp, e.g., any range within about 2,000 bp to about 10,000 bp such as about 2,000 bp to about 4,000 bp, about 2,000 bp to about 6,000 bp, about 2,000 to about 8,000 bp, about 4,000 bp to about 10,000 bp, etc.

[0054] In other aspects, the set of probes targets sequences across the large fragment of DNA at intervals of about 500 bp to about 10,000 bp, e.g. any range within about 500 bp to about 10,000 bp such as about 500 bp to about 5,000 bp, about 1,000 bp to about 4,000 bp, about 1,000 bp to about 2,000 bp, about 1,000 bp to about 8,000 bp, about 2,000 bp to about 6,000 bp, etc. In some embodiments the probes target sequences across the large fragment of DNA at intervals of about 500 bp, about 600 bp, about 700 bp, about 800 bp, about 900 bp, about 1,000 bp, about 1,100 bp, about 1,200 bp, about 1,300 bp, about 1,400 bp, about 1,500 bp, about 1,600 bp, about 1,700 bp, about 1,800 bp, about 1,900 bp, about 2,000 bp, about 2,100 bp, about 2,200 bp, about 2,300 bp, about 2,400 bp, about 2,500 bp, about 2,600 bp, about 2,700 bp, about 2,800 bp, about 2,900 bp, about 3,000 bp, about 3,500 bp, about 4,000 bp, about 4,500 bp, about 5,000 bp, about 5,500 bp, about 6,000 bp, about 6,500 bp, about 7,000 bp, about 7,500 bp, about 8,000 bp, about 8,500 bp, about 9,000 bp, about 9,500 bp, or about 10,000 bp. In certain embodiments the intervals are substantially regular intervals, the difference in the sizes of intervals being about 250 bp, about 200 bp, about 150 bp, about 100 bp, or about 50 bp of each other interval.

[0055] In certain aspects of the present invention, the first set of probes or second set of probes comprises probes of about 50 bp to about 500 bp in length, e.g., any range within about 50 bp to about 500 bp such as about 80 bp to about 120 bp, about 50 bp to about 250 bp, about 100 to about 500 bp, about 150 bp to about 300 bp, etc. In certain aspects, the probes comprise a first segment that hybridizes with the large fragment of DNA and a second segment that does not hybridize with the large fragment of DNA. The second segment may be about 20 bp, about 30 bp, about 40 bp, about 50 bp, about 60 bp, about 70 bp, about 80 bp, about 90 bp, or about 100 bp in length.

[0056] In some embodiments, the large fragment of DNA is about 2,000 bp to about 50,000 bp in length, e.g., any range within about 2,000 bp to about 50,000 bp such as about 2,000 bp to about 20,000 bp, about 2,000 bp to about 10,000 bp, about 2,000 bp to about 5,000 bp, about 5,000 bp to about 50,000 bp, about 10,000 bp to about 40,000 bp, etc.

[0057] The step of shearing the DNA may be accomplished by a number of methods. Such methods include sonication, needle shearing, nebulization, point-sink shearing and passage through a pressure cell. Restriction digest is the intentional laboratory breaking of DNA strands. It is an enzyme-based treatment used in biotechnology to cut DNA into smaller strands in order to study fragment length differences among individuals or for gene cloning. This method fragments DNA either by the simultaneous cleavage of both strands, or by generation of nicks on each strand of dsDNA to produce dsDNA breaks.

[0058] Acoustic shearing involves the transmission of high-frequency acoustic energy waves delivered to a DNA library. The transducer is bowl shaped so that the waves converge at the target of interest. Nebulization forces DNA through a small hole in a nebulizer unit, which results in the formation of a fine mist that is collected. Fragment size is determined by the pressure of the gas used to push the DNA through the nebulizer, the speed at which the DNA solution passes through the hole, the viscosity of the solution, and the temperature.

[0059] Sonication, a type of hydrodynamic shearing, subjects DNA to hydrodynamic shearing by exposure to brief periods of sonication. Point-sink shearing, a type of hydrodynamic shearing, uses a syringe pump to create hydrodynamic shear forces by pushing a DNA library through a small abrupt contraction. In some embodiments, about 90% of fragment lengths fall within a two-fold range.

[0060] Needle shearing creates shearing forces by passing DNA libraries through small gauge needle. The DNA passes through a gauge needle several times to physically tear the DNA into fine pieces. French pressure cells pass DNA through a narrow valve under high pressure to create high shearing forces. With a French press, the shear force can be carefully modulated by adjusting the piston pressure. The press provides a single pass through the point of maximum shear force, limiting damage to delicate biological structures due to repeated shear, as may occur in other disruption methods.

[0061] As used herein, the terms “nucleic acid” and “polynucleotide” are used interchangeably, and include polymeric forms of nucleotides of any length, either deoxyribonucleotides or ribonucleotides, or analogs thereof. The following are non-limiting examples of polynucleotides: a gene or gene fragment, exons, introns, messenger RNA (mRNA), microRNA transfer RNA (tRNA), ribosomal RNA (rRNA), ribozymes, cDNA, recombinant polynucleotides, branched polynucleotides, plasmids, vectors, isolated DNA of any sequence, isolated RNA of any sequence, nucleic acid probes, and primers. A polynucleotide may comprise modified nucleotides, such as methylated nucleotides and nucleotide analogs. The sequence of nucleotides may be interrupted by non-nucleotide components. A polynucleotide may be further modified after polymerization, such as by conjugation with a labeling component. The term also includes both double- and single-stranded molecules.

[0062] In some embodiments, the purified small fragments of DNA from the biological sample are analyzed by Sequencing by Synthesis (SBS) techniques. SBS techniques generally involve the enzymatic extension of a nascent nucleic acid strand through the iterative addition of nucleotides against a template strand. In traditional methods of SBS, a single nucleotide monomer may be provided to a target nucleotide in the presence of a polymerase in each delivery. However, in some of the methods described herein, more than one type of nucleotide monomer can be provided to a target nucleic acid in the presence of a polymerase in a delivery.

[0063] SBS can utilize nucleotide monomers that have a terminator moiety or those that lack any terminator moieties. Methods utilizing nucleotide monomers lacking terminators include, for example, pyrosequencing and sequencing using γ-phosphate-labeled nucleotides. In methods using nucleotide monomers lacking terminators, the number of different nucleotides added in each cycle can be dependent upon the template sequence and the mode of nucleotide delivery. For SBS techniques that utilize nucleotide monomers having a terminator moiety, the terminator can be effectively irreversible under the sequencing conditions used as is the case for traditional Sanger sequencing which utilizes dideoxynucleotides, or the terminator can be reversible as is the case for sequencing methods developed by Solexa (now Illumina, Inc.). In preferred methods a terminator moiety can be reversibly terminating.

[0064] SBS techniques can utilize nucleotide monomers that have a label moiety or those that lack a label moiety. Accordingly, incorporation events can be detected based on a characteristic of the label, such as fluorescence of the label; a characteristic of the nucleotide monomer such as molecular weight or charge; a byproduct of incorporation of the nucleotide, such as release of pyrophosphate; or the like. In embodiments, where two or more different nucleotides are present in a sequencing reagent, the different nucleotides can be distinguishable from each other, or alternatively, the two or more different labels can be the indistinguishable under the detection techniques being used. For example, the different nucleotides present in a sequencing reagent can have different labels and they can be distinguished using appropriate optics as exemplified by the sequencing methods developed by Solexa (now Illumina, Inc.). It is also possible, however, to use the same label for the two or more different nucleotides present in a sequencing reagent or to use detection optics that do not necessarily distinguish the different labels. Thus, in a doublet sequencing reagent having a mixture of A/C both the A and C can be labeled with the same fluorophore. Furthermore, when doublet delivery methods are used all of the different nucleotide monomers can have the same label or different labels can be used, for example, to distinguish one mixture of different nucleotide monomers from a second mixture of nucleotide monomers. For example, using the [First delivery nucleotide monomers]+[Second delivery nucleotide monomers] nomenclature set forth above and taking an example of A/C+(1/T), the A and C monomers can have the same first label and the G and T monomers can have the same second label, wherein the first label is different from the second label. Alternatively, the first label can be the same as the second label and incorporation events of the first delivery can be distinguished from incorporation events of the second delivery based on the temporal separation of cycles in an SBS protocol. Accordingly, a low resolution sequence representation obtained from such mixtures will be degenerate for two pairs of nucleotides (T/G, which is complementary to A and C, respectively; and C/A which is complementary to G/T, respectively).

[0065] Some embodiments include pyrosequencing techniques. Pyrosequencing detects the release of inorganic pyrophosphate (PPi) as particular nucleotides are incorporated into the nascent strand (Ronaghi, M., Karamohamed, S., Pettersson, B., Uhlen, M. and Nyren, P. (1996) “Real-time DNA sequencing using detection of pyrophosphate release.” Analytical Biochemistry 242(1), 84-9; Ronaghi, M. (2001) “Pyrosequencing sheds light on DNA sequencing.” Genome Res. 11(1), 3-11; Ronaghi, M., Uhlen, M. and Nyren, P. (1998) “A sequencing method based on real-time pyrophosphate.” Science 281(5375), 363; U.S. Pat. No. 6,210,891; U.S. Pat. No. 6,258,568 and U.S. Pat. No. 6,274,320, the disclosures of which are incorporated herein by reference in their entireties). In pyrosequencing, released PPi can be detected by being immediately converted to adenosine triphosphate (ATP) by ATP sulfurylase, and the level of ATP generated is detected via luciferase-produced photons.

[0066] In another example type of SBS, cycle sequencing is accomplished by stepwise addition of reversible terminator nucleotides containing, for example, a cleavable or photobleachable dye label as described, for example, in U.S. Pat. No. 7,427,67, U.S. Pat. No. 7,414,1163 and U.S. Pat. No. 7,057,026, the disclosures of which are incorporated herein by reference. This approach is being commercialized by Solexa (now Illumina Inc.), and is also described in WO 91/06678 and WO 07/123,744 (filed in the United States Patent and Trademark Office as U.S. Ser. No. 12/295,337), each of which is incorporated herein by reference in their entireties. The availability of fluorescently-labeled terminators in which both the termination can be reversed and the fluorescent label cleaved facilitates efficient cyclic reversible termination (CRT) sequencing. Polymerases can also be co-engineered to efficiently incorporate and extend from these modified nucleotides.

[0067] In other embodiments, Ion Semiconductor Sequencing is utilized to analyze the purified small fragments of DNA from the sample. Ion Semiconductor Sequencing is a method of DNA sequencing based on the detection of hydrogen ions that are released during DNA amplification. This is a method of “sequencing by synthesis,” during which a complementary strand is built based on the sequence of a template strand.

[0068] For example, a microwell containing a template DNA strand to be sequenced can be flooded with a single species of deoxyribonucleotide (dNTP). If the introduced dNTP is complementary to the leading template nucleotide it is incorporated into the growing complementary strand. This causes the release of a hydrogen ion that triggers a hypersensitive ion sensor, which indicates that a reaction has occurred. If homopolymer repeats are present in the template sequence multiple dNTP molecules will be incorporated in a single cycle. This leads to a corresponding number of released hydrogens and a proportionally higher electronic signal.

[0069] This technology differs from other sequencing technologies in that no modified nucleotides or optics are used. Ion semiconductor sequencing may also be referred to as ion torrent sequencing, pH-mediated sequencing, silicon sequencing, or semiconductor sequencing. Ion semiconductor sequencing was developed by Ion Torrent Systems Inc. and may be performed using a bench top machine. Rusk, N. (2011). “Torrents of Sequence,” Nat Meth 8(1): 44-44. Although it is not necessary to understand the mechanism of an invention, it is believed that hydrogen ion release occurs during nucleic acid amplification because of the formation of a covalent bond and the release of pyrophosphate and a charged hydrogen ion. Ion semiconductor sequencing exploits these facts by determining if a hydrogen ion is released upon providing a single species of dNTP to the reaction.

[0070] For example, microwells on a semiconductor chip that each contain one single-stranded template DNA molecule to be sequenced and one DNA polymerase can be sequentially flooded with unmodified A, C, G or T dNTP. Pennisi, E. (2010). “Semiconductors inspire new sequencing technologies” Science 327(5970): 1190; and Perkel, J., “Making contact with sequencing's fourth generation” Biotechniques (2011). The hydrogen ion that is released in the reaction changes the pH of the solution, which is detected by a hypersensitive ion sensor. The unattached dNTP molecules are washed out before the next cycle when a different dNTP species is introduced.

[0071] Beneath the layer of microwells is an ion sensitive layer, below which is a hypersensitive ISFET ion sensor. All layers are contained within a CMOS semiconductor chip, similar to that used in the electronics industry. Each released hydrogen ion triggers the ISFET ion sensor. The series of electrical pulses transmitted from the chip to a computer is translated into a DNA sequence, with no intermediate signal conversion required. Each chip contains an array of microwells with corresponding ISFET detectors. Because nucleotide incorporation events are measured directly by electronics, the use of labeled nucleotides and optical measurements are avoided.

[0072] An example of a Ion Semiconductor Sequencing technique suitable for use in the methods of the provided disclosure is Ion Torrent sequencing (U.S. Patent Application Numbers 2009/0026082, 2009/0127589, 2010/0035252, 2010/0137143, 2010/0188073, 2010/0197507, 2010/0282617, 2010/0300559), 2010/0300895, 2010/0301398, and 2010/0304982), the content of each of which is incorporated by reference herein in its entirety. In Ion Torrent sequencing, DNA is sheared into fragments of approximately 300-800 base pairs, and the fragments are blunt ended. Oligonucleotide adaptors are then ligated to the ends of the fragments. The adaptors serve as primers for amplification and sequencing of the fragments. The fragments can be attached to a surface and are attached at a resolution such that the fragments are individually resolvable. Addition of one or more nucleotides releases a proton (H+), which signal detected and recorded in a sequencing instrument. The signal strength is proportional to the number of nucleotides incorporated. User guides describe in detail the Ion Torrent protocol(s) that are suitable for use in methods of the invention, such as Life Technologies' literature entitled “Ion Sequencing Kit for User Guide v. 2.0” for use with their sequencing platform the Personal Genome Machine™ (PCG).

[0073] In some embodiments, as a part of the sample preparation process, “barcodes” may be associated with each sample. In this process, short oligos are added to primers, where each different sample uses a different oligo in addition to a primer.

[0074] The term “library”, as used herein refers to a library of genome-derived sequences. The library may also have sequences allowing amplification of the “library” by the polymerase chain reaction or other in vitro amplification methods well known to those skilled in the art. The library may also have sequences that are compatible with next-generation high throughput sequencers such as an ion semiconductor sequencing platform.

[0075] In certain embodiments, the primers and barcodes are ligated to each sample as part of the library generation process. Thus during the amplification process associated with generating the ion amplicon library, the primer and the short oligo are also amplified. As the association of the barcode is done as part of the library preparation process, it is possible to use more than one library, and thus more than one sample. Synthetic DNA barcodes may be included as part of the primer, where a different synthetic DNA barcode may be used for each library. In some embodiments, different libraries may be mixed as they are introduced to a flow cell, and the identity of each sample may be determined as part of the sequencing process. Sample separation methods can be used in conjunction with sample identifiers. For example a chip could have 4 separate channels and use 4 different barcodes to allow the simultaneous running of 16 different samples.

[0076] By whole exome sequencing of individuals with a neuromuscular disease phenotype component and their family members, the inventors have made several discoveries of genetic mutations that result in a variety of neuromuscular diseases. These discoveries include identification of novel mutations in genes that have previously been associated with NMD as well as novel mutations in genes that have not previously been associated with NMD. These mutations are described in FIGS. 2 and 3.

[0077] In some embodiments, the present invention relates to diagnosing a subject with NMD by detecting a mutation in a gene with a variant of high confidence. High confidence variants (FIG. 2) are those variants that have high quality sequencing data and the variants identified are most likely causal. In these cases, additional evidence supports the conclusions such as additional families that the inventors have sequenced with mutations in the same gene and/or the phenotype is consistent with literature evidence for loss of function of the gene in which the variant is identified.

[0078] In some embodiments, the present invention relates to diagnosing a subject with NMD by detecting a mutation in a gene with a variant of low confidence. Variants of low confidence (FIG. 3) are from high quality sequencing results, but there is less supporting evidence for that variant being involved in disease. For instance, the variant may be in a gene that may be involved in NMD, but never before reported as disease causing. The variant might not be assigned a highly damaging value by prediction algorithms and no evidence is available to confirm damage to the gene product. It may be a variant that is likely the cause of disease but there is no clear biological tie to the disease as yet.

[0079] One type of NMD is spinal muscular atrophy (SMA). SMA is a currently untreatable, autosomal recessive genetic disease caused by a deficiency of full-length survival motor neuron (SMN) protein. The symptoms are the result of progressive degeneration of motor neurons in the anterior horn of the spinal cord resulting in weakness and wasting of the voluntary muscles.

[0080] Type I (Acute) SMA is also called Werdnig-Hoffmann Disease. SMA type I is evident before birth or within the first few months of life. There may be a reduction in fetal movement in the final months of pregnancy. There is a general weakness in the intercostals and accessory respiratory muscles. The chest may appear concave. Symptoms include floppiness of the limbs and trunk, feeble movements of the arms and legs, swallowing and feeding difficulties, and impaired breathing. Affected children never sit or stand and usually die before the age of 2.

[0081] Type II (Chronic) SMA is usually diagnosed by 15 months. Children may have respiratory problems, floppy limbs, decreased or absent deep tendon reflexes, and twitching of arm, leg, or tongue muscles. These children may learn to sit but cannot stand or walk. Life expectancy varies. Feeding and swallowing problems are not usually characteristic of Type II, although in some patients a feeding tube may become necessary. Tongue fasciculations are less often found in children with Type II but a fine tremor in the outstretched fingers is common.

[0082] Type III (Mild) SMA, often referred to as Kugelberg-Welander or Juvenile Spinal Muscular Atrophy, is usually diagnosed between 2 and 17 years of age. Symptoms include abnormal manner of walking; difficulty running, climbing steps, or rising from a chair; and slight tremor of the fingers. The patient with Type DI can stand alone and walk; tongue fasciculations are seldom seen. Types I, II and III progress over time, accompanied by deterioration of the patient's condition.

[0083] Type IV (Adult Onset) typically begins after age 35. Adult SMA is characterized by insidious onset and very slow progression. The bulbar muscles are rarely affected in Type IV. It is not clear that Type IV SMA is etiologically related to the Type I-III forms. There is a second type of Adult Onset X-Linked SMA, known as Kennedy's Syndrome or Bulbo-Spinal Muscular Atrophy. It occurs only in males, and, unlike the other forms of SMA, it is associated with a mutation in the gene that codes for part of the androgen receptor. The facial and tongue muscles are noticeably affected. The course of the Adult Onset disease is variable, but in general it tends to be slowly progressive or nonprogressive.

[0084] Type I, II and III SMA are caused by a mutation in a part of the DNA called the survival motor neuron (SMN1) gene, which normally produces a protein called SMN. Because of their gene mutation, people with SMA make less SMN protein, which results in the loss of motor neurons. SMA symptoms may be improved by increasing the levels of SMN protein. Normally the SMN1 gene provides instructions for making a protein called Survival of Motor Neuron 1. The SMN1 protein helps to assemble the cellular machinery needed to process pre-mRNA. More than 90 percent of individuals with spinal muscular atrophy lack part or all of both copies of the SMN1 gene. A small percentage of people with this condition lack one copy of the SMN1 gene and have a small type of mutation in the remaining copy. About 30 different mutations have been identified. The most frequent of these mutations replaces the amino acid tyrosine with cysteine at position 272 in the SMN1 protein. Other mutations replace amino acids at different positions or produce an abnormally short protein. As a result of these missing or altered genes, cells have a shortage of functional SMN1 protein. It remains unclear why motor neurons are particularly vulnerable to a shortage of this protein. Loss of the SMN1 protein from motor neurons results in the degeneration of these nerve cells, leading to the signs and symptoms of spinal muscular atrophy.

[0085] In some cases of spinal muscular atrophy, particularly the milder cases, the SMN1 gene is replaced by an almost identical gene called SMN2. Typically, people who do not have spinal muscular atrophy have two copies of the SMN2 gene. In some affected individuals, however, the SMN2 gene replaces the SMN1 gene, and as a result, the number of SMN2 genes increases from two to three or more (and the number of SMN1 genes decreases). On a limited basis, extra SMN2 genes can help replace the protein needed for the survival of motor neurons. In general, symptoms are less severe and begin later in life in affected individuals with three or more copies of the SMN2 gene. The SMN2 gene provides instructions for making a protein called survival of motor neuron 2. This protein is made in four different versions, but only isoform d is full size and functional and appears to be identical to the SMN1 protein. The other isoforms (a, b, and c) are smaller and may not be fully functional. It appears that only a small amount of the protein made by the SMN2 gene is isoform d. Among individuals with spinal muscular atrophy (who lack functional SMN1 genes), additional copies of the SMN2 gene can modify the course of the disorder. On a limited basis, the extra SMN2 genes can help replace the protein needed for the survival of motor neurons. Spinal muscular atrophy still occurs, however, because most of the proteins produced by SMN2 genes are isoforms a, b, and c, which are smaller than the SMN1 protein and cannot fully compensate for the loss of SMN1 genes. A recent article by Cartegni and Krainer [Nature Genetics 30, 377-384 (2002)] suggests that the molecular basis for the failure of the nearly identical gene SMN2 to provide full protection against SMA stems from inefficient recognition of an exonic splicing enhancer by the splicing factor SF2/ASF. Even so, the small amount of full-sized protein produced from three or more copies of the SMN2 gene can delay onset and produce less severe symptoms, as seen in spinal muscular atrophy, types II and III.

[0086] Another form of NMD is myotonic dystrophy. Myotonic dystrophy (DM) is an autosomal dominant neuromuscular disease which is the most common form of muscular dystrophy affecting adults. The clinical picture in DM is well established but exceptionally variable. Although generally considered a disease of muscle, with myotonia, progressive weakness and wasting, DM is characterized by abnormalities in a variety of other systems. DM patients often suffer from cardiac conduction defects, smooth muscle involvement, hypersomnia, cataracts, abnormal glucose response, and, in males, premature balding and testicular atrophy. The mildest form, which is occasionally difficult to diagnose, is seen in middle or old age and is characterized by cataracts with little or no muscle involvement. The classical form, showing myotonia and muscle weakness, most frequently has onset in early adult life and in adolescence. The most severe form, which occurs congenitally, is associated with generalized muscular hypoplasia, mental retardation, and high neonatal mortality.

[0087] Myotonic dystrophy type 1 (DM1) is caused by a trinucleotide (CTG) expansion (n=50 to >3000) in the 3′-untranslated region (3′UTR) of the Dystrophia myotonica-protein kinase (DMPK) gene. Myotonic dystrophy type 2 (DM2) is caused by a tetranucleotide (CCTG)ₙ expansion (n=75 to about 11,000) in the first intron of zinc finger protein 9 (ZNF9) gene (Ranum, et al., 2002, Curr. Opin. in Genet. and Dev. 12:266-271). There appears to be a common pathogenic mechanism involving the accumulation of transcripts into discrete nuclear RNA foci containing long tracts of CUG or CCUG repeats expressed from the expanded allele, and both DM1 and DM2 mutant transcripts accumulate as foci within muscle nuclei (Liguori, et al., 2001, Science 293: 864-867). Transgenic mice which express a large CTG repeat in the 3′-UTR of a human skeletal actin transgene develop myonuclear RNA foci, myotonia, and degenerative muscle changes similar to those seen in human DM (Mankodi, et al., 2000, Science 289: 1769-1773). The myotonia in such transgenic mice is caused by loss of skeletal muscle chloride (ClC-1) channels due to aberrant pre-mRNA splicing (Mankodi, et al., 2002, Mol. Cell. 10: 35-44). Similar ClC-1 splicing defects exist in DM1 and DM2.

[0088] The terms “treatment”, “treating”, and the like are used herein to generally mean obtaining a desired pharmacologic and/or physiologic effect. The effect may be prophylactic in terms of completely or partially preventing a disease, condition, or symptoms thereof, and/or may be therapeutic in terms of a partial or complete cure for a disease or condition and/or adverse effect attributable to the disease or condition. “Treatment” as used herein covers any treatment of a disease or condition of a mammal, particularly a human, and includes: (a) preventing the disease or condition from occurring in a subject which may be predisposed to the disease or condition but has not yet been diagnosed as having it; (b) inhibiting the disease or condition (e.g., arresting its development); or (c) relieving the disease or condition (e.g., causing regression of the disease or condition, providing improvement in one or more symptoms). For example, “treatment” of DM1 and DM2 encompasses a complete reversal or cure of the disease, or any range of improvement in conditions and/or adverse effects attributable to DM1 and DM2. Merely to illustrate, “treatment” of DM1 and DM2 includes an improvement in any of the following effects associated with DM1, DM2 or combination thereof: muscle weakness, muscle wasting, grip strength, cataracts, difficulty relaxing grasp, irregularities in heartbeat, constipation and other digestive problems, retinal degeneration, low IQ, cognitive defects, frontal balding, skin disorders, atrophy of the testicles, insulin resistance and sleep apnea. Improvements in any of these conditions can be readily assessed according to standard methods and techniques known in the art. Other symptoms not listed above may also be monitored in order to determine the effectiveness of treating DM1 or DM2. The population of subjects treated by the method of the disease includes subjects suffering from the undesirable condition or disease, as well as subjects at risk for development of the condition or disease.

[0089] By the term “therapeutically effective dose” is meant a dose that produces the desired effect for which it is administered. The exact dose will depend on the purpose of the treatment, and will be ascertainable by one skilled in the art using known techniques (see, e.g., Lloyd (1999) The Art, Science and Technology of Pharmaceutical Compounding).

[0090] In some embodiments of the present invention, the methods further comprise treating NMD in a subject. Treating NMD may be accomplished by appropriate therapies targeted to the particular form of NMD and the accompanying symptoms. Examples of such therapies include, but are not limited to, laminin-111 protein therapy, which works to stabilize the sarcolemma and reduce muscle degeneration. In some examples, a source of muscle cells can be added to aid in muscle regeneration and repair. In some aspects of the present disclosure, satellite cells are administered to a subject in combination with laminin therapy. U.S. Patent Publication 2006/0014287, incorporated by reference herein to the extent not inconsistent with the present disclosure, provides methods of enriching a collection of cells in myogenic cells and administering those cells to a subject. In further aspects, stem cells, such as adipose-derived stem cells, are administered to the subject. Suitable methods of preparing and administering adipose-derived stem cells are disclosed in U.S. Patent Publication 2007/0025972, incorporated by reference herein to the extent not inconsistent with the present disclosure. Additional cellular materials, such as fibroblasts, can also be administered, in some examples.

[0091] Additional therapeutic agents include α7β1 modulatory agents and agents which enhance α7β1 modulatory agents, such as a component of the extracellular matrix, such as an integrin, dystrophin, dystroglycan, utrophin, or a growth factor. In some examples, the additional therapeutic agent reduces or enhances expression of a substance that enhances the formation or maintenance of the extracellular matrix. In some examples, the additional substance can include aggrecan, angiostatin, cadherins, collagens (including collagen I, collagen III, or collagen IV), decorin, elastin, enactin, endostatin, fibrin, fibronectin, osteopontin, tenascin, thrombospondin, vitronectin, and combinations thereof. Biglycans, glycosaminoglycans (such as heparin), glycoproteins (such as dystroglycan), proteoglycans (such as heparan sulfate), and combinations thereof can also be administered.

[0092] In some embodiments, growth stimulants such as cytokines, polypeptides, and growth factors such as brain-derived neurotrophic factor (BDNF), CNF (ciliary neurotrophic factor), EGF (epidermal growth factor), FGF (fibroblast growth factor), glial growth factor (GGF), glial maturation factor (GMF) glial-derived neurotrophic factor (GDNF), hepatocyte growth factor (HGF), insulin, insulin-like growth factors, kerotinocyte growth factor (KGF), nerve growth factor (NGF), neurotropin-3 and -4, PDGF (platelet-derived growth factor), vascular endothelial growth factor (VEGF), and combinations thereof may be administered with one of the disclosed methods.

[0093] Other therapeutic interventions can include, but are not limited to, proteins, peptides, polypeptides, antibodies, stem cells, nucleic acids, polynucleotides, oligonucleotides, exercise regimens, nutritional supplements, or small molecules. The therapeutic intervention can be pharmaceutical compositions currently approved by the FDA for other indications or compositions comprising a new chemical entity. In one embodiment, the therapeutic intervention is a compound or biologic selected from a compound or biologic library, such as a combinatorially-generated library. Combinatorial approaches are amenable to the development of a large number of potential therapeutics that are created by second, third, and fourth generation compounds modeled on active, but otherwise undesirable compounds. In one embodiment, the therapeutic intervention increases expression of SMN protein. Such therapeutic interventions can include, but are not limited to, compounds such as valproic acid, phenylbutyrate, sodium butyrate, hydroxyurea, trapoxin, and trichostatin A as well as other types of therapeutic interventions. In another embodiment, the therapeutic intervention has no effect on expression of SMN protein.

[0094] The present invention is further illustrated by the following examples that should not be construed as limiting. The contents of all references, patents, and published patent applications cited throughout this application, as well as the Figures, are incorporated herein by reference in their entirety for all purposes.

### EXAMPLES

### Example 1

### Advancing Genetic Diagnosis of Infantile Forms of Spinal Muscular Atrophy

### Background and Objectives

[0095] Neuromuscular disorders are among the most common form of inherited childhood disorders with prevalence as high as 1 in 1700. The inventors have focused on rare lethal infantile neuromuscular disorders similar to Type I SMA, but negative for SMN1 mutations. Their long-term efforts identified the first disease-associated mutations in UBA1 [X-linked lethal infantile spinal muscular atrophy (XL-SMA); MIM 3018300] (Ramser et al, 2008). They have identified and collected samples from numerous families and isolated male cases suspected of having XL-SMA and screened them for mutations in the UBA1 gene by sequencing. SMN1 and UBA1 mutation negative cases are being further evaluated by exome sequencing to identify novel disease causing mutations.

### Results

[0096] The inventors developed a custom Ion Torrent AmpliSeq panel to sequence all 26 exons of UBA1. To date, the UBA1 locus has been evaluated in 24 suspected X-linked probands and family members. All of these cases are UBA1 mutation negative. All variants identified in the coding regions of UBA1 in these cases were previously identified in variant databases, are present in the general population at relatively abundant frequencies, and are not associated with disease. For further evaluation of these cases, the inventors have sequenced exomes of 5 affected individuals and their appropriate relatives from 3 separate pedigrees as well as 6 affected singleton cases and identified potential disease causing mutations. Of particular interest, they identified novel compound heterozygous mutations in two affected siblings in CHRND (acetylcholine receptor, muscle, delta subunit; OMIM 100720). Both affected boys inherited a frameshift mutation from one parent and a missense mutation from the other parent. The missense mutation is in the highly conserved cys-loop domain of CHRND that regulates gating speed. CHRND mutations have been previously associated with Multiple Pterygium Syndrome (Lethal Type) and congenital forms of myasthenic syndrome. In a family with a strong pattern of X-linked inheritance, they identified a novel start loss M1V mutation in SCML2 (sex comb on midleg, drosophila, homolog-like 2; OMIM 300208). SCML2 binds histone peptides that are monomethylated at lysine residues and is part of the polycomb repressive complex 1 that regulates developmental genes. Human mutations have not been previously reported in SCML2. Other potential disease causing mutations are also presented (See FIGS. 2 and 3).

### CONCLUSIONS

[0097] The findings demonstrate that infantile forms of SMA can be caused by divers mutations yet result in similar phenotypes. The inventors describe here novel mutations in a known disease causing gene, CHRND, as well as mutations in novel genes that have not been described previously. The results demonstrate the utility of exome sequencing to identify causes of rare and severe childhood disorders. With current sequencing technologies, molecular diagnoses can be acquired in a timely manner and provides patients, families and physicians with tools to find ways to understand and possibly treat devastating childhood diseases.

[0098] Unless defined otherwise, all technical and scientific terms herein have the same meaning as commonly understood by one of ordinary skill in the art to which this invention belongs. Although any methods and materials, similar or equivalent to those described herein, can be used in the practice or testing of the present invention, the preferred methods and materials are described herein. All publications, patents, and patent publications cited are incorporated by reference herein in their entirety for all purposes.

[0099] The publications discussed herein are provided solely for their disclosure prior to the filing date of the present application. Nothing herein is to be construed as an admission that the present invention is not entitled to antedate such publication by virtue of prior invention.

[0100] The list of sequences are assigned the following SEQ ID NOS for convenience and for reference to the Sequence Listing:

[0101] SCML2 (SEQ ID NO:1) is Genomic DNA sequence; X DNA:chromosome chromosome:GRCh37:X: 18257434: 18372847:1;

[0102] SCML2 (SEQ ID NO:2) is a Protein Amino Acid Sequence (700aa).

[0103] CHRND (SEQ ID NO:3) is a Genomic DNA Sequence; 2 DNA:chromosome chromosome:GRCh37:2:233390703:233401377:1.

[0104] CHRND (SEQ ID NO:4) is Protein Amino Acid Sequence (517aa).

[0105] OFD1 (SEQ ID NO:5) is Genomic DNA Sequence; X DNA:chromosome chromosome:GRCh37:X: 13752832: 13787480:1.

[0106] OFD1 (SEQ ID NO:6) is a Protein Amino Acid Sequence (1,012aa).

[0107] DYNC1H1 (SEQ ID NO:7) is a Genomic DNA Sequence; 14 DNA:chromosome chromosome:GRCh37: 14:102430865:102517129:1.

[0108] DYNC1H1 (SEQ ID NO:8) is a Protein Amino Acid Sequence (4,646aa).

[0109] COL6A3 (SEQ ID NO:9 is a Genomic DNA Sequence; 2 DNA:chromosome chromosome:GRCh37:2:238232646:238323018:1.

[0110] COL6A3 (SEQ ID NO: 10) is a Protein Amino Acid Sequence (3,177aa).

[0111] EMD (SEQ ID NO: 11) is a Genomic DNA Sequence; X DNA:chromosome chromosome:GRCh37:X: 153607557:153609883:1.

[0112] EMD (SEQ ID NO: 12) is a Protein Amino Acid Sequence (254aa).

[0113] ARHGAP4 (SEQ ID NO: 13) is a Genomic DNA Sequence; X DNA:chromosome chromosome:GRCh37:X:153172821:153200452:1.

[0114] ARHGAP4 (SEQ ID NO: 14) is a Protein Amino Acid Sequence (946aa).

[0115] FLNA (SEQ ID NO: 15) is a Genomic DNA Sequence; X DNA:chromosome chromosome:GRCh37:X:153576892:153603006:1.

[0116] FLNA (SEQ ID NO: 16) is a Protein Amino Acid Sequence (2,647aa).

[0117] MID1IP1 (SEQ ID NO: 17) is a Genomic DNA Sequence; X DNA:chromosome chromosome: GRCh37:X:38660685:38665790:1.

[0118] MID1IP1 (SEQ ID NO: 18) is a Protein Amino Acid Sequence (183aa).

[0119] MID1 (SEQ ID NO: 19) is a Genomic DNA Sequence; X DNA:chromosome chromosome:GRCh37:X:10413350:10851773:1.

[0120] MID1 (SEQ ID NO: 20) is a Protein Amino Acid Sequence (667aa).

[0121] CFP (SEQ ID NO: 21) is a Genomic DNA Sequence; X DNA:chromosome chromosome:GRCh37:X:47483612:47489704:1.

[0122] CFP (SEQ ID NO: 22) is a Protein Amino Acid Sequence (469aa).

[0123] While the invention has been described in connection with specific embodiments thereof, it will be understood that it is capable of further modifications and this application is intended to cover any variations, uses, or adaptations of the invention following, in general, the principles of the invention and including such departures from the present disclosure as come within known or customary practice within the art to which the invention pertains and as may be applied to the essential features hereinbefore set forth and as follows in the scope of the appended claims.

The application's sequence listing, which the Patent Office published only in electronic form, follows.

SEQUENCE LISTING (22 sequences)

SEQ ID NO: 1 - DNA, 115414 bp, Homo sapiens
gaatcgttgcgattaactttattaatattttaaaatatgaaaactgtaaaacatagtatttatgtaaacacctgaggactgttcaagtgggtacagcatcttcatacaaacaacttgaaagaagaccaagtttaagtaagaatcttatgacatgtaaggaataacataaatgaagctattctttaaatagttgcattcatgtctaaagtacatttggttttctaaaaagaaaatgtacattcttgcccctggtgaatattttattggcatttacaacaaatggctaatacttttataactgattctcatagcttataaacattacatcaaagttacacaaagtaataacaataaacatatagcaccatttcctcttcaaagttctaacttataaaataaagccccaaacatggctgggcatggtggctcatgcctgtaatcccagcattttgcaaggccgaggtgggcggatcacctgaggtcaggagtttgagaccagcctgaccaacatggagaaaccccatctctacaaaattagctgggcgtggtggtgcattcctgtaatcgctgaggcaggagaattgcttgaaccagggaggcgaggttgcagtgagccgagatcgagctattgcactccagcctgggcaacaagagtgaaactccatctcaaaaaaataaaaataaaataaagccccaaacaataagtcagaactaatatatctttcaaagtgtagcagaataaatggctcagaactaagcaaattaattagaaacattgcataggacagagaacttccctgtatggaaaccaatctacagattgtttcatatcccctgaagagtaagctgagaggtactggtgatagcaaacgatggacatatattttttacgaaatcaaaacatctaactatatacatagttcatcgtcacctctgtggcagtgcaaagtgccagattaaattcaagaaaaaaaagatttacttgtgtgtaaacctacaggtataaaacaatatataaatatggtaaagtaccatatgaagaataaacacatacaatatatatcttcaaaaattttggacacaggtatcttcatatagagatgtaagaaaagaatgcctagttaaatgtccaagcgtagtgaaaatatggaaagttttaaaataataggaatttcactgaaaaaatttaatctgactccatccaaacaaccctcgtagtataaatatctcctgcataaaatgacaattctatcctataatttaaaaaatttatcaaaaactggtaagaacacttcatgaaagcttataagcttgcttttttcctttaaatatgatcaaatacaacatacagagaaataataaaaggaaaataatttatatggctattccctttctagatatactgatagaacatgaacagaacaccacagagtatcacacaaaatatctgagaaaagatgatatctacaggtgcacctttaaattctctagtgaggaaaaattctcatggatttaattatagaagttgtcaatccctgatattttcccctttgggatttagctgttttggttctagatataaaggttaaccaaaatcaaaggtttttctctgttaactacattaagtatatttgtaaactgtacaatgaaaatttaaaaagacataaagaactgccaatttgaatatgccaatactaacctgttaaatgctttttaaagaagtagactgggggagtggcggctgtgtctcccaaagctggttggtgactccaggaaaaaaacaaagttgactgaactgttactacagttctgcaattctgataaaatatttttatgggaactgtctacaaaacaaaaactgctaagagaaatacttttaaattaaaatgttaacagtacacctgagaattatgtccaatctaaacttacacatttttttaactgtattttccttctttaagcttttcaatgtagtaacacagctttaatgctggccccagcttcagccccatatacttcatcatcacatcactcttgagtaggaacagagccttcccatcaatttcctacagagagaaggaaatcataatcattaataatgctttcatatcaaattatttatacataagaacatgtaaaatacagcagctgtatactccggatatatattctctgaatatgctttatttcctgaaaactattaaaaatataatttatacagtgaagcatcatttgataatttatgaatttagttcaaactttaagaaaatttaatcttgtatcttcaaaaaatgtcccaagtatcaaacaatctgactttaaatactgtgtgttaaataaaatactaaatatatctatgacaaaagatcaaaaattatgaatggtagaaatgaatttcagatgatcaataactttctgagaagggccaggaatatgtcaatatcaatgcaaactgtaaatgtgctatacagtgttgtcattatgttgaaggctaatcagttagttgtctgaagctggttagatgctaaaactactgattttcttgcgatagtgaaaagggtacctcagataatagatcactcatttgatttgttagaaaacactgaaaatattacttaatagtcacaaggcatcctcctaaaattctttattaccttaatcaatttatgtcatggaagcatattatttggtatttgtgagttcctgtttaaaaggatgtacttaatcttataaagttgctggattcactggaggaaggccaccctgtaatagcttgtggtcaacccctcctactcatggttctggcactgagctgggagcaggtcggggaggatccttgtatctgtcatcacaaagggaaggtacacctgagagttgcaatgctgaatcatcgtatcttgagaagttgaagcagtttgtattttaggcacctggatactcacttaaagaacagaccattaatctaccatttaaggaactaatcttgggaaaaataacctctctcacatatggaaaaatcagttgatagggttcccccaccatccacacagcatccaaatgaagggcctgcacagaggtcattcaaaggcattacggcaggaaaaccggatcaaaagatacattacatgttgcctgaagaggtcggcgagggggcctgatatctgaggatctgtatgtttcataaactgtatcacttcatccacagaccaggttgaagggtccttagagaagccttgtttcaggacactgggatcaggtacagctatataacttggagcttcaatgggggggaaaaaagacaaatcatacttgacctgatcattatcctgaaagaagagatgttaggtagggaataatggtctcattcctggaaccttttgttaagttccccaacaaggtctcaagactccaactgtgaaagcttatacaaaaatgatgtgaggatggctacataagagcatcccatctgacctcccccaaacaacaaaagcaggttcagacgttaccttaaagcttcaaagatcacaaaacagactaagcaatccaagcctctttggccacagacaaatacagcaaaagatctgttactcgggtaaaattaggttaatctaatctaacctatgacttctctcttactttaagtctttcaaggaatttcaatctctctctatctgtctagactaggtatattttactagctaaatccgatggaaattccccaaatttacagttagtttttgttttgttttgttgttgttgttgttgttttggtttttttgagacagggtctcgctctgttacccaggctggagtgcagtggcacaatcatggctcactgcagcgctgacctcccaggctcaagtgatcctcccaccttgcctcccaagtagctgggactactgacacatgccaccacttgcagctaatctttatattttttgtagagacaggatttatccatgttgcccaggctggtctcaaactcctggactcaagcaatctgcccacctcaggcccccaaagtgctggaattacaggcatgagccaccatacctggctaaatttagttttctaattgcttaaatgtgttcactttaatcaaagaatttcaataatcccattatttttgataaacaaattagtccttttaccaaatctctctgatgtatccaataagaatatttttagcatcactttactctttagattcctgtctctcatggcttaaatgcttatctgaattttgaagaagacaagattattttctgctaagctaggtcagaaataactttaacatttaatttaactcctttatcatgtttaattgcatagtaatagatattttggttgaaggtttatacattaaaaaaatacataactgagacatgaaacaatttaagtgctcatacctcaaatggtcttagctgtgctctttactaagttgtgataaaatctgtgtcctgacaagtattcatttactcaaccagagcccttaactccctaaagttagtgtggataactgaagtgaattttgtacttagctaggaagatttgttttgctaaccaaggactgtcaacacaaatttgatgtttttttgtgtgtgaattagccaaaggagtaccctttctttcctatcctctggactatggccattttagaagcattttaagtatatttacctaggggaaggataaagaaaaacagaaaataaaagaacttatagtggttaattttttgtgtgtagctctgaattttatttctttccaacatcacaacgatgatgtgaaataaaaactctataccaaaatatattctcccctccactcagagaaaaaaatgttggtcatatctacagagaaattctgctaggctgtatcaacccaagtaaaaatgatgatggtgtagaccatgctgtgcctaagttagcattctgacaatttagacagaaacaccatctcctttaacttaacaaagacacaacataacatgaaaaaaatcattggcaaagctaatcatatctctaatttaatgtacatttttgtggaatttctggtttctgtcatcataatctggtacatttatgttttgaataacatgtaactagttttacagtttactgcaaataaactatatgtaaaaagatatgatttggggtataaaattttatattaaaaataaaaccataagattttctatttttagtctattatgaaaatataatttaattgggcctacatcttcaaaacaatcagagaagtttgcaagcattacattattgttattcaaataattacatgaaacaaactaatcatgtgaaaaataatcaaagtccagtcatgcttttctcctgaacggctctgtcttatatacactggcatatcaataaatatttctagaataaatataatgaaagtatgaaagtgatctgatccccccccctcgacatcattggatttctttcctataataaagatcagcaatatttttcattcaaataatgggacaaggcaggacaggaaattgtgtgagcatcactggctgtcaggagtggaattagctctaggtaacagttcaaatgccttaaaaataatagtaatgacacctctagacagtttctaatggaaatgcgtatctattcttgggaggtgcaaggagtacagaagttaagagtacaaccctggagtcagagtgtttgagctcaaggactggcccagccactttctagctgaggaaccttagccaaatgacttcaaatttcttacctgaaaatgcttaccagcacctacatttcaaggaattgttgtaacaatataatgtaggaggccatatgaaatattatatccctggcatacatcagatagtgatgaagatgatgattatttctattaccagtaagtaaattactagaaagcaatgttattactattagtctctacattgctaagaagaccagaagctagccgtctgatgccccaataccggctaccttagtgtttgacatacatttcaaagtgagatattcaccattagaagtaaccttatactgagaaagcctatcgccaaaaggtcatactttgtgaaaatactttaaaatgcaaggtatactagccattatggagtaagcatctattgttagactctgcaagctatgtcactctaaaggcagagacaatctccagaggggatggggctgacaacattaaatgtgtcatggtgtgtgcacagtgtggttgcccatagataacacccatgatcaaaggcaagggttcccacttccttcactcctcaacctcgcctgcatgcctacctggagaaaaaggacaaaacacttattcccaccctcactctcctgtacccttaatccttcaaaggtacagggtattagccctctttgcacatggaaggccgttttggctcctttctttctttcttctttctttttgagatggagtttcactcctgttgcctaggctggaatgcaatggcgcaatctcggctcactgcaacctctgcctcccgggttcaagtgattctcctgcctcgggctcccaagtagctgggattacaggcatgcatcaccatgctcagctaattttgtatttttagtagagacagggtttctccacgttggtcaggctggtctcaaactcccgacttcgggtgatctgcctgcctcggcctcccaaagtgctaggattacaggtgtgagccaccccgcgcctggcctgttctggctctttctaaatggcaacaggatattgccctacttatacatgtcatgacttcctggtgggtctgaggaaggatgtggagagtgaggaaatggtgtggctgtggtaacaagatgccagcccgaatccaggagtcaacacaggctgaggccaggaatgtctcaagagagacgaagaaaagtgtacaacagaaaggagagggactgtctttccaggcctcagagtcatgagaggtttgtgagtccagacggtacccaaggaaatgataaattacaactgttcaagcactactaatctgagaagtctctatcagagacatggttggtgatccagatccctagagacagttctgtgctgtcaagaggattggaggatccataatggtctgacctgacagtgatgtgaaagagaggactcagcctcccaaattttagcactttctccaatgtgatactctcaggggatgctgttaggtatgaaaatctcaaggcaaaagacaaacacattgagagtcactatttttgaacataccttcacttttcctctgcatttggaatttaacttcatggggactgctcttgggggatatgtccccaactagtggtgaacttgtggtgcctggcacacttcgagaaaaatcctgggagactgaagtatgaatatacataggatttctacaggcaggattcaaataatttcctgaatttagtgatgagctcttagaatcttctgaaagattctcctctttgggaatggcacttcccccagcaaacaatggttctcctacagggaaaaagacaaaggaggctatcttcaatagacttacaattcaaatactactaaaaggttaaaaatctcatccctagcaatagttcacttaacttgtgctatactgaaccacaatgctctaacacaaagttcatggctatcccctccttggtatggatgcatacactgattgattgagacaaagttttgctcttgttgcccaggctggggtgcagtggtgcaatcttggttcactgcaacctccgcctcctgggttcaagcaattctcctacctcagcctcccgagtagctgggagtacaggcgcctgccaccatgcctggctaatcttttgggttttttttagtagagacagggtttcatcatgttggccaggctggtctcgaactcctgacctcagatgatccacccgacttggcgttccttggcatttatattaatggacattgtcctacagtccaaagtgattccatatcacctatatttttcatagtaacttactatcatttgccagtcttgccaccaaggctataaacacctcactgaagcatttgtttttagaaatgcagttcttcattactatttgttataatatgatcatacagttggtttctaacatttgtttactacttgggcagttacattctctggagaaaggcagtaggtttttctattcttctttctgccagtttttagcaatacaaaagtgaaggaaaaaggttattacaatttttttttaatctatggagaaatgacagccgtccacttctgaagggaatgaagggttcaacaaagctgtccaagtagtagcctaactgccaaacttgtttgggcaaatttacctccctacctccaatactaccaccccaagagtatacataagtggtagcagagaaacatttcttcccagtcctgggaggtgtaaatgctatttaccttcagacgcatactcctttgttttggggagcttaggagagagaggaacaacatatggtacagtttgctgaggagatcgtttggtgctttgcctttctgttacatcttcttttgctgttttcaaagaaaaaacagttgtctgttataacgaactaatatactcaagcattttcatatcatcagcatgaaacacttctgtttctacatcatttgcctacaataccttcattgagaacttctcaattatttgatgttcatgaataacatgtgtctatttcatcctattttatattttcactgaaataatattcaagagttaaaagcatttccagaaggagcatatctaggcttctttattctgaggttatcagatctctctaaatatctcacaagacagtgaggcaacccattaaaatgtgtctaaaatggcctgagaaaattgttcccatgagccagaggagttaaaacttcagagaaattaaatgatataatataatgaacatccattttgttaagtaacaatcctggcctagagctacccttaaaacaagtctactgcttacttatcattcaaccaaatgcacttctacctaaaggaccactccgtaaagcatgatcctgaaagtaaagacagctttaattatcagttataccctaagtatcaacaaatatcctgatttaacctccaactaaaaggacaaataaggtgtaagagaaatctaaaaagtctgatagtagacctcaaaagagaagaaagattgcaatgagtatcaaagtcaaacttcatctggttcaaaattttggctgagggccaggcatgcttctcaaaatcttatgatgagcaacctttagctcaatctagttactcagtgaatcccaatgagtccagtagagctcttaccactttagtttcatttttaataatggactgtaaaaccaacaggcaaaacatatctcatatttctacaattaagacattaaattctaaggaaagaaataactggcttttcatacccatttaataatatggaatattcgagttctaaaatatagttttctataaatgtttatttacctcagaatctcggcaagattagaaaaagtcttcatcatttatttgtaatgtactcatgctttatgaaaagtttatcaagctgggtatggtctactatctggggctgaaacaaatataaaattgactcgacttctgcttctgcgtattgtagtaagctaagggagcaaagtgttcctacagagataactaggaaaagccaggtaatttacaaagtattttttaaatcatcagagaagcacttccaggatgactgatcaaagacctccaaaaatctactccttcataaaaacaatgaaaacactggcaaaaactataaaaactatctttttcaaaactctggaaattaaagacttgcaacaatccaaagtgtttaagaaaaatggatggatctcagaaaaaaacagcaaattctgtggcattttaacttgccctaatataatccccctcaccccattttcacagtagccttgaaaaccaacacttcacaactacagcaggtgtgaaaaacagccatgcgataatcgctggagggggcacaatgggtttggagctctccaaaagccccatgcccagagaactatcactattagaccagtctcgaagctcactgaaaagctccttttcagggtttgtctttttttgacctaaattagagcttgttctgtgtgaacaaccccatctccagggcatctgacgggggaaaatggtggcaactgtttaactttgcagctgcctgagacaatattaccagtcagggctaacaacaggctggccaaaaagcttaaaaggaaaaactgggtataagatgtcccctaggagactttgaaaaacacaaacatattcctgggaatctagacggttcacatgcatatgcacagatgtatacatgcatgtccaggaaagacatgagaacaccctaatctttcatctctggctgaccttgaggctctgcacaaggttgacttacaagctgcctcttggagcactgaagttatgtcccaacacacacagaaaatcccttggccaaggctgggagatacactggttccaggcatttaaggaaatatctacccaatcattagctaaccacattaagctaaccaagcagacttcagtggccactcttaacaaagaaacacagactttacagaattagtcgaggaaaagtcactaaacagcaccagcaacaacaacaaaccctagggagaagggaatctgatttccagagttgccattatatgatttttaaatgtccagttttcaacaaaaaaaaaatgagacatgcaaagaaacagtatggtccatacaaaggaaaaaaaaatcagtaaacagaaactgtccctaaggaagcccagacactggacttactagacaaatactttattttgggacacagtctcactctgttgcccatgctggagtgcaatggcatgatctcagctcactgcaacctctgcctcccaggttcaaatgattcttgtgcctcagcctcccaagtagctgggattataggcacatgccaccacgcctggctaatttttttttttcttttttttgagatggaggctcgctctgtcacccaggctggagtgcagtggtgcgatctcggctcactgcaagctctgcctcccgggttcatgccattctcctgcctcagcctcccgagtagctgggactacaggcacccgccaccacacctggcaatttttttttgtatttttagtagagacggggtttcactgtgttagccaggatggtctcgatctcctggccttgtgatccacccacctcggcctcccaaagtgctgggattacaggtgtgagccactgtacccgacctagacaaatactttaaatcaactattataaatattttcaaggacctaaaaaatgaaaatcatgtctaaagaactaaaaaaaaggctggtgtattagtctgttctcagactgctaataaagacatactggagactgggtaatttataaagaaaaagaggcttaatagactcacagttccacatggctggggaggactcacaatcatggcagaaggcaaaggaggagcaaaggcacgtcttacatggcagcaggcggaagtgcagagcaaaggggggaagccccttataaaaccatcagatctcatgagaactcactcactatcacaagaacagcatgagggtaactgcccccatgattcaattacctcctactgggtccctcccatgacctgtggggattatgggaactataattcaagatgagatttgggtggggacacagccaaaccatgccacctcatctctactaaaaatacaaaaattagccaagtgtgggggcacacacctgtagtcctggcactctggaggctgaggtgggaggactgctggaaactggtggcagaggttgcggtgagccaaaatcacaccactgcactccagcctgggtaacagagcaagattccattgcaaaaaaaaaaaaaaaaaaaaaaaaaaaagtaggaagtgaaaagacaaccccaaagaatgggataaaatacatgcaaagcatatacctcatataggacttgtatccagaatatacgaagaactcttatgactcaacaataaaaagacaatgaaaccaattaaaaatggacaaaggattcgaacagacatttctctgaagatatacaaatggccaaaaagcataagaaaagatgctcatcatcaactactggaaaaatgcaaatcacaccataatgagataccatttcgcacctgctagaatgggtataatgaaaaagatggacaataacaagtgtttaaaaggaaaaattgaaactttcattcactgctgatgaaaatgtaaaatggtataacctctttggaaaagtctgtcaggtcctcatcaagttaaacagagttaaccatatgacccaacaattccactcctaggtttgtacctgagagaacacgtatccacacaaaaacttatatacaaatgttcattgcagcagcattcctaatagccaaaaagtggaaacaatccagaagtacatcaattgataaatggataaacataatatagccatacaatagaatattattcagccataaaaaggaatgaagcactgatacatgctaccacatgggtgaaccttgaaaacatagggtgggcacagtggctcacacctgtaatcccagcattttgggaggccaagatgggcagatcacttgaggtcaggaattcgagaccagcctggatgacatagtgaaaccacgtctctactaaaaatacaaaaattagctgtgtatggtggtgtgcacctgtagtcccagctactcaggaggctgaggcaggagaatagcttgaacccaggaggcagaggttgtggcgagccaagatcacaccactgcactccagcctaggcaacagagcgagactccgtctcaaaaaaacaaaacaaacaaacaacaaaacacattatgctaagtgaaagaagccacacacaaaggttgcatattatatgattctattaatatgaaatgtctagaataggaaaatctataaagacagaagaaagtcaataaatggtatccagtggtgagggggaaaagacattgagggatgatagttaataggtatgggatttctattgggggtgatgaagacagtggtgatgactgcacaactctgtgaatacacttaaaaaatactgaattgtatacttctaaaagggtgaaattatggtatgtgaattatatctcaataaagttactataagaaaagcatcctcaaagtatagcagtcataggaactaataaaatccaattccagaagggaagaaccattctagtctaaactgaagatttcgtcatattttttccctgtaggaatctgctgattcttggcactacagtgaaaatagaacttgacacaggcagagggccatacctaggcaaaaataaatcaaaaaagatttagcagcttcacacagctggagtgacaaatcagaaactcaaactcagctggttttcccccatgggatatttgccaagttctggagctatacaggaagctggggagttaggctgaaaactcttaaaaggcacgctgaaatctctcacagtctcatgatgcttaagaaataaagacccaccagggggtctttattttattgtgtgtttgtggcaaacacacaagccacctaaacacaggtgcaaagttgtgataatacatgaggaagaaggctaaagagctgagcagcaaacccctgaagaagggaagtacaattccccagtctttcaaggctaaggagctagggaattcccaggttctcaatcaaaatcctgggaaagtaacacctgaagaatagcgaggaatcaggagatagactgagtcttactaaaactgctattcagtcccaacccagctcaatcactgaatggaatgagccctccttctttctgcttaaaaaagaggaaactttttaaggtagaaatctggagcttctgcagatcttttatatacaatgtcccatatacaaaaaaatagtggtaaacatgcaaagaagtaagaccatataaccaactattgagagaaaaactactggtgtcagtagacaaagactataacgcaattttgatgaatatgttcaagaaaacaggaaaaatggacagaaaagatcaaagaataaaaaatttcacctaagaattataatctatttaaaaaagcagagagctgataggaaagtaaactgaggcaaccactttgaaaaactgtttggcagtatctactaaagcttaatctatgcatttcctgtgacctagcaattccctccaagatagatacaggaacagaaagacgtgtatagaatgttcatgataacactatttataagagtacaaaacataacactatttataagggcacaaaacagaaagcactcaaatggatacataccatggtagcatatttatacaacagaatattatacagcaatgagaatgaatgatctaactatatgcaacaatacagatgaaacttacaaacataatgataggccaaaaaagctaggcacaagagtaaatgctgtataattccatttctataaagttcaaaaataggcaaaagtaatatatggtactagaagtcaggacagtaggtatccttgtgcgaagtgaggggtagtagtggattaaagggggtttgacacattagcagtgcttctagggtactagtaatagctacttttccaaccagtgactgattatacaggcatgaaaattaatcaagctacattccatgtataattttctctatgtatactatacttcagtaaaatgtcttcaaaattactgctaaaatatgcaaacactagatttgtcagaatcaaagtctcctaagaagagcactctatcttaaactatttttgagtcacttattttaaaaaatgtaagagaaatgggatactagacgtgaaatcttagtaataacctcatagcatttatatgcaacttctttaactacaagctgacttaagaaaaacataagagttccaactcaaagccattttcaaatggctaaattaagctttctgtgacagaaaattaataacccctaaaataatgtaaaatatgtggattattcagtgtattttttcaaatagttacctattctgattatttgattaatctgaaaattcaaacattttgtgttcaatttaaagaagaattacattttctttaaaatctttcaaagaatgaggctttgtaaattactggcattcttaatgctttgtgtaagaaatcaggaaattgggcctggcatggtggctcaggcctgtaatcccagcactttgggaggccaaggtggaaggatcacttgaggccaggagtttgagaccagcctggtcaacaaggtgaaactccacctctactaaaaatacaaaaattagccaggcgtggtggcaggtacctgcaatcccagctattcgggaggctgacacaagagaatcacttgaacccaggaggcggaggttgcagcgagccgagatggtgtcactacactccaacctgggtgacagactgagactctgtgtccaaaaaaaaagaaatcaggaaattgtactctcaacatctccaactcgtatttttccccaaattactcttagaaacagaaaacctatcaatacacagacacccctcttcccacacaggtggcccttcccttcctagccatcttccaaatttcctaccattttggatgacctcctacctctcctgaagaaggaaaaaaaaaggataatatcacatgaaaacatgaaacctcactcttcctcttccccctagttctaacagctaccttttattgctcctacttcatgccaggcataatgcaggctaagaatttacatatactttctttcaatttcacaaccaaagaggtatccactttgcagataaggaaactgagaactagagaggctcagtactttgtctatgggcacatagctagttaacagcaggaactgaattaaaatgtaggccggtcagactttatactctttcagcagagattacaaggccaggattggaacccaggtctgacaaactccaacacctgtgctctccatgccactgcttctccatgtatactttttgcaagcatgtcacagtatcatacctttatttcaaagggactcactggacagctacaccagaggggagaaactggaaagaggactccagttagaagcctgctttactaaaccagagaaggggttagtacagtctgaagcagggtagtaacaaggaaatggaaaaaaggggatggatatgagagatgtcactgaagtagaggagacaagctttatgaagaagggtgagggtaaccaggaggaccagaaaaaaaagtagtagctagagacgtggtacccacgcttcacacttgagtggcacgtgaattagaatccctggacttaaaaagatagtctgtgatggtactctgtatttccagaatcagcagcagctggccagaaaaccatgcggcaataacacctgagaacttcagctactcttaaaagacccacatacaatcctgccatgatcaatagaacacagttagctttcatgagtcacatgaaaaagagacaaaccactcccaaaaaacaaacagcacttgcataaaagctgaaagagctttcttgctttagggatcagaagcaagaaacccacttttggttctacagggctatcttacacctacccttttattcaggcatcggtttggggttcttatggaagagaagcaaccatggttcaaatgtcaaattcaagcatatcacaggctgggtgtggaggctcacacctgtaaatcccagcactttgggaggccaaggcgggaggatcacttaaggtcaggagttcaagaccaccctggccaacatggcaaaaccctgtctctactaaaaatacaaaaattagctgggcatggtggtgggcgcctgtaatcccagctactcgggaggctgagacaggaagatcgattgaatctgggaggcggaggttgcagtgagccgagattgtgccactacacttcagcctggggtgacagagtgagactctgtctccaaaaacaacaacaaaaccgtatcatcatttgtcaaacctcaatgacaacaaaattatctttatagccaataggctcaacacgctttgctaacttctgaggattataaaagtcagtaactttaaagccatacttcagtctaatagagaatgtttaactctgtgaggtagtcaaaatgaagccaaacataagtaagccatgggctttgattctgaagttcattatgaatacaagaaattactttcctattttgaatgaacaaaaacaactatatgttatacatttctaattagttcactgtggctaaaatgtttactttgaggagaacacaaggaaaaacaattacacaagattctcaagtgaaacagaagtgtaagagtttacattttctctcacctgactgatttttatcatgctctgcagagctgtgagtatgacccctggaagaactaaaaggctggctactcaaaaggttatcacactgcagactgtggcagaagttctcaagaaagcgaagagcaaatgatgcactgttcactggagggagctggatggaatgagtttccccatcaaaggaggctattgggggaaaaaaaaggatgtcagtaacctcagagagatgagaaatacaacactaattaaaaaaaaaactatcaccttaggaaaggtattataagtctaatttgtgttctttgtaattcataaaggaatgatcttatattataaaagctcctctcaaacacaatagcctgtattggtaaaaacatcctcatttgaaaatactcttaagtcaacaacaacaacagaaactcactgatctatgtaacacttccttctattccaaatattccatgggtatgaatgttgtggtgtctgatcatagccaccaacactatcttattgcttagtgacttcttgagtcacatatttatttagagcttcttatagataaaatatattatcagccaaggtactctgcctatagtgagcttaacacagcatgtaaaacgaagaatctgtgacttttgtcccaatttacattattctgacatcatttgtccattttaaaagtaaacttttcaaaccagggcttaaagtctataaacatataactcctataaatgttctattatactaatataataaatattacaggctaggtgcggtggctcacacctgtaatcccagcattctgcgaggccaaggtgggcagatcacatgaggccaggagttcacgactagcctgggcaacatggcaaaaccctgtctctactaaaaatacaaaagttagccaggcatgatggcgcatgcctataatcccagctactcaggaggctaaggtgggagaatcgcttgaacctgggaggtggaggctgcagtgagccaagatcacaccactgcactccagcctgggtgacagagtgagaccctgttctaaaaagatgaaggaagaaagaagaaagggcgggggagggggaaggggaggggaaaggggaaggggagaggaaagggaagggggaagggaagggggaagggaagggggaagggaagggggaagggactgaattagacaatgtattagataagtataccagttatcacttctcctccacgattatctggcttcaggtatccaaaaacagttttagtttcaagggcacaatccacacaggcctgcacaatccggcgaagcaccacattcaccgggcccgggccgaagtggtcaggcagctgctggattctcttgggatccagatgagggccaaagtttccatgtttgtttacatagacacagacttgagaaaaaatgcgtatgcatacataacaatgagactgattaaaagaaattttgtgaaaacactacataatcaattactatatcccactatccacttcactcacagaaaacctaaatatagttaatatcaatgatcatttctgctacctaaaaatatgtaaatatatttttacattgatgcaaagacactgaacccacaaagaaacaatcaaaatgtttattcaattttttagaatcttgtccaaactgatgatataaaatctacagacattttaggcacatcacaaaaacaattcttcatacattcccacattatataaaatggcacaaagacagatgaatattttcatcttttaattgtatacacagtacaagaatttcctttcaaaacgggtcatcttgctatgctcttttttggactgaatttattttaaatcaccaatactgcacctcaattatattttctaaagtaaccaaacaatttaagatatatataacaagttatattgatatatattaatattttattaattttaggaaaataaaaatgttccttctatatataccaagattcatggaagaaaattttaaaataaactctttccttagtataataaaagcatatgatatagaagcaattcatctataatcacataaatgccaacttccaataattttctttactgagaatcaacaaatgcaaatcaatatacactataaaaacatgagggaagctgggcgcagttggtcacgcctgtaatcccagcactttgggaggccaaggtgggcggatcaactcaggtcaagagtttgagaccagcctggccaacatagtgaaaccccatctctactaaaaatacaaaaattatctgggtgtggtggcacatgcctgtagtcccagatacttgggaggcgaggcagaagaatcacttgaacccgggaggcagaggttgcatttagccaagatcacgccactgcactccagcctgggtgatgaagtgagactgtctcaaaaaaaaaaaaaacaacaaagaaacaaaacatgagggcacatcactaccaaaaataaaataaattgtccccctaagaagcatgttatttttaatccattaattaatattgcaaaactttcacacacacatagtctatatttagtataagaaaactgatcaatctcagttttgctctgttgaaatatacaattcaattttgtggcaacagccagaggaaggactgttatccttcagaaatgaaatagctattaaaaattcaacccacggtgctgatgacatggacaaattctactgaacacaagcgaagctaaacaaggatttcaatgttttatctcctttgtgttatatccatttagctagtctttcctgctaattaaaaatcagaaataataaactgaaaaaaatgagatatgttacaacaatcatttttaaagtgacttctatttttaaaaaactaaatttacttttagtcaggaaagaaaaattaaaaggaaaaaaaagtccagggaataggagagtgtaagggagataatttttaaaaggcattaagaaaaggtttgaggcagctttgaaaatacataccatacaaaaagacaaattttgaaatgagataaagggaaaacaagaatagattggacaatgtaaattgcataaatcttacttaaatggataaaatactttaagagtatctgaattttcaagtgactcatgtatttaaagactttttccttaatgtaaaatggaacaatcagaatttcaaaatactttaatatgaaaaatgcaaagataaatgtttaatattaccatctttttcccttattattttatttccaggacttcgaagacactgaaaataatacaggataaaagattagtaattctatactatttttaaaatatgaatttacctgtagacatcactattttacatggcccagaagcgacatctttatataacatgccacggtctctggtcagcgattttagagaagctgcagatgtagaacatatcacgggcaaaggtttttcctgttaaaaacaaagggaaaaaaacacaagtatacaatactcattaatatattcttagataagaaagtcagaaattataaatatcattggtttataaaattattagttatcagaagtcctcaggttggaaactcccgtgtgtgtcatgaactgcagaactttccaaactgagcttctcagaggaccacaaactgtccaggtaggggagaaagagaccaaatggctgggattccctgtcctacccctgctccaactaatcacaccttagccaaattagattattccataaaacatactttattttttgaggttccctgtaagacaagttttttcacattgctaaagaaaagtctgtaaatctctaacccagagcaatacctccaatagaaaaaaaatctcagcaaggcagaggacagagtttattttcagaaagaagttgctcatctagttagtcttcgctgtgtctaacccacagttctccatattacatacaataattctgacaaaatcacaacagatggcttgctaaagtctatacaaaattatgcctactgcctataagaaccaatgtttcctgagcattgttaaacttcactagcattttgtttattttacatcaactcttggggttttccaggagctaccttcaaacatgactctccaatataagagaagggactcctgtgcatagaaaaggtaataacagagggcatttaaaaggcaggaacaaaggagtaaaaaatagaacattcgatgttgctgaaatttatttgcttaaattaatggctgtcgtttgggttgacagtaatctagtaaaccacattttttgtttatttaacattgatacagtgttctttatcaatgttaaagaaacaaaaaatgtgatttttttttttttgtcttgctatgttgccctggctggatttgagctcctgggctcaagggatcctcctacctccgcctcccaaagtgctgggattataggcatgcgccactgcctggacacaatcatgttatttttcagtactgaattataattactgggttgaccatgtcattctttcactattttaaaaatctgaaatctgaatcctttgtcttgagacataccaagatagtatgtttgcattaacactgcaaattgaataaaggtacattcattaagaaaatgtgctcctgcactcctcccttaaggggaggaagaaaatgacaacttgtatccaaatatgacatagatcccataaatacatacaagtattatgtattcataataaaaagtaaaaaacttttaaaataatttttaaaagattaaagtacctgccccttctccatccccatcatcaaataaacaatgttttcaaagagagctctccaaaattatcaaattagcttggaactggaaactaaaggagtcaaaggaaactatttggtgttatcttacattttcaccattataccaactaatcacaaagacatttcagaagctggaaaatatacacacatgttaattttttaatgcatttaaaatattatttcactttaaatttcactattaacttttcttacttttatttttcatttaaaaaatttcatctgctaccatttatattagaacaatctgcctgatttttttcaatgttcatgactatatttttgaaatatttagctttgacttttgatttttattttgtaaattttgagtgtttttaaagaaaaataacagtatcaatatattttaaaatcacaatgttattttttttccatacagcaaacataagttgaaacaaaatggaaatgttatagatactgatatcggatggctgaactcaggaatgtgtaagataatactgctggcatttaattcagtcagccacaagagatctgaaaagattctatgtctttatatttagagtgcatctcttgtagacaggacatatttgggtctttaaaaaaaaatccatgttgataatctctgtctttttaactagaaaggataatccactaacttttcatgcaattaccagtatgtttggatctgggtctacctttttttttttttttttttttgagatggagtctcactctgttgcccaggctagagtgcagtggcgaaatctcggctcactgcaacctccacctcctgggttcaagcgattctcgtgcctcagcttcctgagtagctgggattacaggcacctgtgagcatgcctgactaatttttgtatttttagtagaaatggggtttcgccatgttggccaggctggtcttgaactcctgacctcaggtgattcaccagcctcagcctcccaaagtgctgggattacaggcgtgagccaccacgcctggctgggtctactatttcattgcctgtttttgatttgtctcctctgtgtttggttctgttcctccttttcctttcctttttttttccccctttgagacaaggtttcactcctgtcacccaagctggagtgcaaaggcaccatctcagctcactgcaacctccacctcctaggctcaagcaactctgctgctgcctcagcttcccatgtagctggggctacatgcgtgtgccactgcacccagctaatttgtgtattttgtgtagagatggggttttgccatgttgcccaggctggtctcaaactcctgggttcaagtgatctttctgccttggcctcccaaagtgctgggattacaggcatgagccactgtacccagcccctcctttccttttgttaacagtttatattccttagaatattttataatgaatatatttgaatattcaaatattccttagaattacattttaattttctattggctttttagctataattctttgcattttttttttttacaatatgccctggggattagaatgtacatccttaactttctacaagccacataaagttaatattgtaccacttcacataaaatggtgaaatcttgcaatgatataggatccatatcccccacgtcaggcctttatactacaattgtttcatgtctgttaaatataaactctgcaacactgtattgtaattagttataaatagtcatgttattataagtcatttgcatttacccaaagatttaccatcttcaaaacaattcctttctctttgagaaaccaggtttccatctggtctcattttcctttaagcatttcctgcagtgctggttcgacaatgatttatcttagtatgcttttatctgaaaatgaaaatgtcctcaccttcattctttttaagaaatatttatatcttttgtttcatagaaaagagtaataaggaaaagatttccttcacaatagcaacaagaatcataaaatatgcagaaataaataagaataaacgagagtataaattatatgaagaaaactattgaattctactaaggaatcttttctactttattaaggtataattgacaaacaaaaattatatatattctaagttcaccttcattctagaagagtatttttgatagatacagaatttcaggttgatagttttttttttttttttcctttcagccctttaaagatgttgttctactctcttctggcctccatggcttttgatgagaaatgtcagctgttaatcaaatttttgtttctctgcatgtactttttcattcttacattgttatctttaagatttgctctgtctctggttttcaacagtttgactctaatatgcctcagcttagatagatgtctttgtgcttattctgtttgctcttggctgagtattgtgtctatgcatttctttcatgacatttggaaaattttgagactttatttcttcaaatattttttctgctccagtttctctttcttttccttttgggactccaattacattgtattggacctttgatattatctaaaaggtctctgggttcgttttctttctcaatcttagtctgagtttttcacactggataatttctattcttctatcttccagttcatttactctttctcctgtcatctccagtcaattctggttaattttgtccagtgaatcttttacttcagatattgtatttttcagttcttgagtttcaatttggctcctttttatcctttgtttctccactaagatggtctttttaatcagtacgattgtgtgtgtgtgtgtgtgtgtgtgtgtgtgtgtgtgtgtgtgtgtgtgtctgtgtaatgtcatcgaagaccagttgaatagccactttaaaatttttgtttgctagttctaatatctgggttatacttgggtctgtctcagttgattttcttttttcttgaaaatattattcattttactatgtatttgggtaattgtgaattacattccagatgttacaaatattaatttgtgcagattctaaattctatatttctctgataattgttatttcttttgtttagctagtaattaccttggctggacttgaactttaaattctgatcttgggcctaatttcatccagcctcagttcagatcttttgctttagctacaccggcctgttgtgtattagacaaacatgctcagatcaggggtctgtcagagacgttggtagacagaatttgcagataacctctctggtcctttcccttccaaaatccctccattccctttaacagccacagttttcctggcttttctattttctggtttccctaggccagataaattgttgtttttctactaatactcctgttgtttcacatggtacacaaagtgtacttgacctaaggcttaaaaccacaacaatggaaactcactttgtataacaccccttatcccagtgagtacttcccctgccaccagaatctgtctgcttccattcactcttcagtgtcttcaggttgttgctttttctattatttctaagttttagagttgactccagcattattgaattcatcagattgattcttctctccctgccccagtttattgaggtataatatatgtacagtaagattcacttcacattgatttttaaagtatactgagtttcaaactaactagtctgaacataaatacacccatgtattaatagtactttcattgtggttttgaagaagtagaacactataaaaagttttaagtttgcccaagcaaagaaataacaatctatcgatagttatgtgaggctttcaaaagcctacatactcttagtacatttctaaagaccctcatcatactcttagtaaattcctaaattgtatgttataaataataaggcactataaaaacctataatacaaattaggaggacatacaactaaccttttttcctgagtttggaccttttttccttggtgtgatatttttaacagaactgctccttttggggactgcagtaggtccaggtggtttaattcgacttgatctcctgacctgctgtgttggtaatattagagtagttttctgtggagactgcattgaatgctggcttgcttcggaaggagaagactctgtttttgctatattctttacaataggaactgaggaaaaaaatacaaaaaatattaaagtaaatgacacaattaaggcattgtctcctcatgactcaaaataagttttactcgacctttaaaaccatttccaaaggttattcactgaaaaccacttaaaactaaaagtaccatctgaaatgaagttttaggtatcctaagatttcatattatttgaaaatagtttaattctccagaaaaaataaagcggtttttattagaggaatcagtaacttcaacttagcatggtaaaaattcctagcaacttacctattaggaacttcccatatttttatgggaagcacaaaaaggagtctttccttcagaatacactatccaattatgtcatatacaggaatcatctctcacatcaacatagaaaaacatagcaaagcaattgcctagggctcctgcttcatgtttcagagggcaggggctcccttgctcttgacttttttcagatttaatgaggtataattggcaaataaaaattatatatttaaggttgatatacattatgtccctatatgtatgtctactaataaagtttcatatactaaaatagagactttacattaatgttgtcatggaaagatcactatcaggcccaagtgatttgtagctactagtttccttgtagcccaatacagtttcaatattcaaataaaggttacctgccaggttacttttgtccatgttcacatttaagtaaaaagagatatgtttagtattaattccttgataatttcattattacaaataaatgaattttacatagtaaaaagcactaatgcttaaaaaaattctttacaggaagaactatgtaagtgaaacatttatacatctatgcaaaaatcaactactgttattttgagggcttcattttacaactccaaaccaatctgctgctttgttcctcccacactcaaagactatgtacatgtaaatctgacccgcaatagataataccacatctttcctacggccttttcatctaccttctaccacttaccaaaccaaaaggaaggaacagcctatcctgagctgccagggcaaagagaggaccacttcactgccaacatcactttccccctcatttacaagtagtttgcctacttacaccagcctctttttacctcattgccatcatctacttcatactccaggctcacttccacttttttgaaaaagtccagtaacctaacacacattatttctgcatacatagtcttcctgtcttcatcttaaggaatctgaccatcgtactcttggatgcttcatcatcctgaccttatcactggagagttcagctatttcctaaaatggctgtagttggcaatttctgaaactcttgtatctccaagacaaccaaccatgtcccctttctccaattccaacttccttacctgttatctttgcttcaaaccaactgatcaggctttacattctcattatgacatctatccacaagcccatattccattttcatgcaatccattagctttcttctggctttgctttactctctactcaacctgcacccaactgtccacctccaccaaaaacccctaactagtataccttcttttatcaccctttgatctttgatcatgtccagaatgtcagtccccatctctgagtcacactatcatctgctttctctggtcctgagctatagaacaagggttagctatctttttccaggaagggccagaaactaaatatctcacgctttgaaggccacataaggtctctgtcgtacattcttttttgtttgggtttttttttttttgagacggagtcttgctctgtcacccaggctggagtgcagtggcgcgatctcagctcactgcaagctccgcctcccgggttcatgccattctcctgcctcagcatcccgagtagctgggactacaggcgcccgccactacgcccaactacgcccagctaattttttgtattttgtggtagagacggggtttcaccacgttagccaggatggtctcaatctcctgacctcgtgatccacctgcctcagcctcccagagtgctgggattacaggtgtgagccactgcgcccagcccttttttgtttctttgtttgcttatttttctacaaccaattaagaatattaaaaaaattcttagcttataagctacatgagctggatgtggccctcaggctattgtttgccaactcttgctttagaacattaagatgctactggtgtctataaaatccatgctaacctcaactgaggagtcactgctgcaactcactgatttccaagtatgtttccatggtagaaggcttttccctatttaagttcccatctccctttctctcttccattcagggaatgacccaatcttctactttatgagaagattaaaggctatcccctttgggggtaaacttaaaaatcccatttctctggctgggcgcagtggctcacacatgtaatcccagcactttgtgaggctgaggcaggtggatcacctgaggtcaggagttccagatcagtttgaccaacatggtgaaaccccatttctactaaatagacaaaattagccaggcatggtggtgcatgcctgtaatcccagctacttgggaggctgaggcaggagaatcacttgaacccgggaggcagaggttgcaatgagccgagaatgcaccattgcactccagcctggacaacaagagtgaaacttcatctcaaaaaaaaaaaaaaatcccatttctccatcttaaaatactttttcaatcattctcatctttttctcttacatcaaatgaaaagttttctcggtggggggagggaggagggatagcattgggagatatacctaatgctagatgacgagttagtgggtgcagcgcaccagcatggcacatgtatacatatgtaactaacctgcacactgtgcacatgtaccctaaaacttaaagtataataataaaaaaaaaaagaaaagttttctctctagttttcgaagtccaatcttcttttatttatgccttaacaacaccttgctttggttcctatgggacattttggtttcaattatctcttctctcctcaatatttgatcactcaatccccaactccttgctgtctcttactactttcacatatcccttattttgaagttacctccctgtttctgatacactttcaagcccttgagggaattccctctttccactcactactatgaataaaacatcaagaagaattacctatacttgacatttcaatttccttattattccatttccttagcccctgtaataaacttttcttcccccaaacatattttaaagaaattattttccaaggtcattaagtgacctctttttagttactgagatggttaggctttgtgtccccacccaaatctcatcttgaattgtaatttccataatccccacatgtcaagggagagaccaggtggaggaaattgaatcatggaggcggtttcccccatgctgttctcgtgatagtaagagagttctcacgagatctgatggttttataaggggctcttcccacttcgctcggaacctctctttcctgctgctttgtgaagaaggtgccttgcttcctctttgccttccaccatgaatgtaagtttcctgaggcctctccagccatgctgaactgtgagtcaattaaacctcctttataaattatccagtttggggcagttccttatagcagtatgaaaacagactaacacaattactaaacccaaataaaatgttcattctcttgaccaatctactgatctctacagttctagtccccaactctaaatatatagaatgaagaagaggaataattgagctccagatctgggttcaaattcctgtgccaggttggtttaagacagaacctaggaatataggaggtcctcaaaaaatactgaatgaacgaatgaaaaatattttcagcctgcaagtcaatgttatacccccaaaactagtatattctatataaaataagcagttaaattgtagcaaatagtaactttacagaacatggcaactataatgaaatcaatatttgatctaactattttggcatttgaaaactgaagctatagtttcaaatagtcccctaaagtatatatatttgttctatattataataaaaattttttgatgtatggcatatatgtatgtatgagcaaagttaaaaacaaagtactataaatttttttttttttttttgagacagagtctcactgtgtcacccaggctggagtgcagtggcatgatctcggctcactgcaacctccacctccctggttcaagcaattctcctgctttagcctcccaagtagctaggactacaggcgcgtgccaccatgcctggataatttttgtatttttagtagcgactgggtttcaccatgttagtcaggctggtctcaaactcctgacctcaggcaatccgcccacctggcctcccaaagtgctggaattacaggcataagccaccgcgcccggccaaaaatttttacatatgaacaaaatttcactttagaaagcaggcttttcaaagtcaaggactcagttttttgggggtttttcattttttgtttgagacaaggtttcactctgtcgtccagtgccgacatgcaggagtgaagtgatgtgatcatagctcactgaagccttgaactcctaggctcaagtaatcttcccacctcagcctcctaaggactcgattttatttattgccatatccccagcacctagaataaaatactttttaagccgattcaactaaaaaggaaagagtaaccattcaatatattacacatcaaaattaaactcccaggagcaatcatataacatacatatagatatacatacatatatacacacacacacaccatgctgaaactctattcagtattaaactacttgaaataggaaatggatttgtttaaataaggttaaaactatatataaaactttatatgttcatatgtatatgaacacacaaactttgtgtgttcatagtggtcacaaagtgaataaaaatctttttgaaaaagttatgtgaaatataaagaaggatatgctactcatctttaataaaacttttatgtaaacaaccaacacaaaatttacctggttcttcagcttatcttcagacagaacagaaaatgtccaggtaagaaaaacatccaagaaatgataattattgaattgtggaaatgaaaaagaaattaacaaatcttgggaaacaatctagaaggcaaggagtaaagccaacagggggtctggaagcctggaatgagggaaactagagaaagaaaggagataggtgccaatatttactggctacccattacatgctaggcacttcaatatccattattgcatgaaatcctcccaaacatcctatgaggtagatattgtttcctcactttacacatgaggaaacataggctctgtgaggttaggtaactgagccaagagcacccatgtggttaagagtgtttgcctcctaagctcatgccttttccaatatgccactctgctttctgtcctgtaacaacaacaacaacaacaaaaaggccatcatcaaattcactcccaagtcaagatgcatgtgtgtgtgtgtttttttttaatgacccagtggacaaccttgtgaactcctatgtgctgtttcactatatagtcaatagtcaacaggtgctctctgacagggactcttgtttagaaaaaaaaaatcagatgtgaaagcatgtttatagggaaaaatattaacaagcagagtatccccccgttatccatatattctgggggatacattctgagatgctcccccacccccctgcccagtggatgcctgaaactgccgatagtatcagactccatatatactatgtacgaattttttttcccttctttgcaatttcatagataaaagttttgttcttactgtagaccttggcaacctaagcatatgatttttgtctttccttattcagtcaacaactttcaccttttcacttaaaggaagcctagagttcatatacactcagctgtgctgcccaatgcctctgcttggaactttgctccctgtcccacagaacccagattgccacaaactaatcaatcatgggcagcaataagagcaaaggggaggtaggtcaggtataaaccccgtgagcttccttcatttgctcctgctgccatcccataccataacactggcttccttgactggtgtcttcagatactgctctatttcttctctcccttccccctacctgtatcagaagagccactcgtcccatcccagaggtcaaccttgctttgggaattaaacattcgtaacaaccaagtctgctcttcctctgaaaataccttttgaatactcaaggactgttactgtcagataagagtgactttacctctccataagcatagaagtcctttaaatgtatgtttatttccttattttcagcaacaacaaaataccctttaagaacacctcaaaggctgaggaaaactctagaaggaaaccacaaggggtagataccagtggaaaggaaaacaaggaagcatgttcctggtacttatcacaacaggcatctggaagtcagaagccagctgaacactaagaattttctcagaagaggtggggtagagatcacatggacatggggctctgttaccaattgctctttacagctattcctttccctgcttctcactatctattgtaggaacactggttccatactaattaggttcaaatccagcttcgccacacaatacctcctatgagatttggggcagattatttaaattttgcacgtggcacatttaatcaacagcagcaacactcacatcaccatccctgtctctattcctaccctcctttcccaggccctaaaggtgttccttgccctcttctatcaatggattagagactggggaaggcttgccgccactgcctgacaaatggaaggaaaaaagtttcctccaaagaaggaaatcctacttacctacactctccccagctaataccttctctatttccttttaagactaagcttctttaaagactagtccatgttcactattattacgattttctcatttttaacctgctataacaacatttccacagatacaaccttttagggaacctttgtgtgttaatatcaccaacaacttcctaacagccattgacaatggatgcctcttcctgatcttacttgatttttagcactagacactctgccttcttttcaaaattctttaagtctcacatagcaactctttcctgagttccctcctacttccgtcacttttccagtagtgttcctcatgattgactgccttctcccccatccccacctcagttttgagtgctctagttcagtcccattatttcagctactgcctatagtaatgattaccaaatcattcactctcacgttctcttgcctgctcaagtgcatgcatacttgtgcacatgcctgcatactctctctccctctctctagcataggcctcttgcaagttccagagatgttttcaatagccaactagatatctacataagcatcccaaattcaacatttccaaaagtagaattcattttgtttatcctaaattctctatcttgatgaacgacattacctatctgaagtcagaaatcttgaagtcatccttgtatgcttcctccctccaaatgtctagccaagcctacctcccaagtatttcccagatgtgttattcatgcctgtcaatgacttgattcaggacctcataatgatagaaacaggaggcagagaaattctgggagggtgggttcccagcaagggccttaccctcaagccaaaaagcttgataccatggcccaaagtgagaacttacatctctgttttactgctcaaatgttgccttttccaaaaccacccatggccccccttaccccccatcctgtgcccataaaaaccccagtctcagctggcagagtgaggagaagtagctggacctcagagactatggttggacatcacagagaagcggcttcacttcagagggacagcttgccagtgtagcttcaggggaggattgccttcccactccatccccttttcaattccccatcccactgagagccacctccatcagcaataaaatcccccacatttactatacttcaaattcactcatgcaacctcattcctcctggatgccagacaagaactcaggtgccacaagtgcgagtgcaaaaggctgtcacactgaccctccactgagctgttaacacttaagccatctgtggatggcagagctaaaagaacactgactgttaacactccctctggggcttcaggggtcacaggtacccccctagatgctgccatggggcccccatggagttcactccttccagcgcccaaaagcactcgccccagctcctgcacctgcccacctgtatgttcctcttcccacaaggggtggaatgtagcaggtccaagtgagtggagtttgcccctgccggcaccaaagcagccagctagtgcactccagttcccacccatgaaggggtcagggaaatatcctgcttcaataacctctcacataagctacattagcctcttaattgccattccaggctgccctttctgatccatactctagcccataagcatgatctttagaaaatacaaatttatgtcacttttccacttgaaactcttcagtgatgccacattacctacatgctaaaatcttaattccctggtctgctgtctaaggccctctactatctgccctctgtgtatcttcatagccccatcttttttcccagctgtcattatagattctgccataatcatctgtgtaaaccaaaaaataaaattctaagccccactcccaaccatcggaatggacttccccctaggatagggcactttaaaatttaacctgaaagactggttcaggtctgatgagaaacaggggtcggatatgcctcgttatacctctccagcattaatatcaacacagacctttagtctgataagaaacatttatgatctattctctctgaagcctgctacctgcaggtttcatctacatgataaaacttggtctctacaacctcatatcacaacccagacatttcttcctactgataactctttcaaccaattgccaattcgaaaaattttaactctatgacctggaagtccccccaccttcgagctgtcccacctttctggaccaaaccaatgtattttcttaaatgtatttgattgcagtctcatgtctccctaaaatgtataaaaccaagctgcaccctgaccaccttgggcacatgttctcaggatctcctgggggctgtgtcacatgccagggtcactcatattcggctcagaataaacctcttcaaacattttacagaatttgacttttcgtcaacatctgctcaggcttccattctcactctttctgtcttcacagagatcgatcctcctttcaggaaagggcttcccttccttgttgtcaatggctaaactattacacattctttgaaattctgctcaactaccagctctgtaaaattctagcaataagttacccaggcaaacataggaccatgatgctcacacagcacacatactgtatgtatttatctctattggcatagaccttataacatcttatctttatttacatatatctatctgtcccaccacactgtgagttcccttaggagaaggaactatgttaagttccactgttatatctcaaatatctggtctagggcctaccatataatgtgcatccaataaatgtttgctgattgttaatgttaatgactgtttaaaattcaggttttgtctctgatcttatgttctcatagaaacaattcagggtgtttatgcattaaattgactactatagcttgatcgtaacattttaccattttcttggcaaaagtaagcttcaaatactcatcgaccaacttaatttttagaatatattcaaaacagaaggaagaactgcaaatttaggtaccacttcatactcactaggatggctataataaaaaagatgacaaataacaaccgttggcaaggatgtggagaaatcaggacccttgtacactgctagtgagaatgtaaagtggtgcagctgctgtgaaaaacagtttagcagccgggcgcagtggctcacgcctgtaatcccagcactctgggaggccaaggcaggcagatcagctgaggtcaggagttcgagatcagcctggccaacagaaaccccgtgtctactaaaaacacaaaaatccgccaggcgtggtggtgcacacctgtagttccgctactcgggagcatgaggcacgacaattggttgaacccaggaagcggaggttgcagtgagccaagattgcacgactgcactccagcctgggtgacagagcaaaactcagtctcaagaagaaaaaaaaaaaaaaaacagtttggcagttcttcaaaaaaattaaattaccatatgagctaccaattccactcctaggtacagatcccaaagaactgaaaagacgtactcatatatatgtgagtggaattggtagctcatatggtagtagtgctgctatgaacatgggtgtgtatgtatgtattgacatacatacatacgtatacatacattgacatacatacatacacacctatgttcacagcagcactattcacggtagccaaaaggtggaaaaagcctaaatgtccatcaacggagaaatggataagcaaattgtgacatatccatacaaaggaatagtattcagtcataaaaaggaatgaagtactgatatatgctacaacatgtataaaccttgaaggcattatgctaagtgaaagacacaaaaggtcacaccttgtatgatcccatttacacaaactattaatatctagaataggtaaatccatagagacagaatatagattggtgattaacaagggcaagggggagaaagaaatggggagcaactgtttaatgggcacagggttttcttttaaggtgataaaaatgtttcagaataaaatggaggtgatggttgcacaacatagtgaatgtactaaatgctcttgaattgttcgttttaaaatggctaattttatgttatgtgaatttcaccacatctaaaaaaaaaaaaccaaaaacaaacaaaaaaaccaaccttgggataaataaaaacaaggaagaaaatttgtttctgtttttgtttgagacaaggttctcactctgtcacccaggctggagtgcagtggtgtgatcatggctcactgcagcctcgacttcccaggctcaagagatcctcccacttcagcctctcaagtagctgggactacaggcatgcaccaccacacccagctaacttttttattttttgaagagacagagtttcaccatgttgcccaggctggtctcaacctcctggcctcaagcaatccacccacctcggcctcccaaagtgctgggattataggcatgagccaccatgccaggtccaggaaggaaatttgcaaacctcaaatgtgccatagactctgcatatagtattaaaatttgtctttacaattttgtgaagcaagtgttatctctattttaaatatgaataaacagaggctcagcaagataagtaaccacccaacccagtatcacacattagtctagaagtggtagaactaggattcaaattcagaactgtcttacccaaaagcttatgctctttgtttaaactgggtactatttttaattaatgaggaggaaaatgaaaagagatcttttaatcaaaatattttcttctataaacttaaacataaaacagaattaaatattttggttaaatatgtttttcacgttcaaatttgagggagcttacataaaccacaaaaaaaaagaacaaagtagtacagaaaacaaatatcgacatgcccttccttaataatccagtgtaataggggagaagatggccaactagacacagcaggaagtgccgttcccaccaagagaggccaaattagctgggtgtggtagctcacacctgtaatcccagcactttgggaagccgaggcgggaggatcacttgagctcgggagttcgacatcagcctgggcaacatggtaaaaccccatctctacaaaaattagccagatgtggtggcacacgccagtagtcccagctacttaggaggctgaggtgagaggatcacttgagcctggaaggcagagactgcagtgagctgagatcatgccactgcactccagcctgggcaacagagtgagacccgattttgaaattaaataaataataaaagagagacaccaaattatcaactaaagcaccataatttgggcagatctttggggagaaaacaccaagagtgaatggataggcaccactgaagcaaaggctgaagagggaggaagctgggaaccctgcacagggtacccgaatgcaaggctagctcccagccctgaacagctcctgagaaaggggtaaaagaactgaaggacaactcactctggccacggacctctgtgactttagctacagaggaccctgcatcccccatggacatgtgaattggcagggggatctacccgggaaggaggcagagacaggcctttggatggtgcagagcccaggaggttttatgtgctgggcagctctggcagagagcagccacagacacccagctgatctctgagccaggagagagctgggccagcttccccatgggactggagcatgcctgctctgcaagccctcctgccaccagcccctcccaggcccaatgcctagctactgtgcaggagcaggtgcacggcacagcccctgcagcccagcctgagtgccttgctgcaactgattactttcctagcaaccaagaagcacatcagatcccccagcacagctggaacctgaccaggagccacggaaagttccagttcctccacggctgcagcctgcaactagggagtatacagctgagatctgtggctgccactcgaggagaggaggggtacccaccctcagagccctgagaggggcaagacatgtaggttcctgagccagggcgggagcagggtgtgcctccctcggagggccggtccagaaggggtgtggtgtatttctccactgcaacccctgcccgacaggacaccacaacctggaaaacctaacaaaagaatcacaagcacaacagtcatcagagggggctcccccaaggcccaggagcagacctgggaggggaccacttctcttcctctgtaccccactatagagcatgcctgtggacacgaggaagtacaaaagcgtggatgggtactaacctaacaacctacagctattactgtcaagtgccatctactggatcacagcacaaactacaaaacgaaaaattattgggctaataaatacacctataaatcaaatgtaagaattcacctacacataaagatcctgcacagggcactggccccttgaaagcatccagaaatgaagccaatggactatactcaacttacaccacagttaaaggaacaccaaccctcctagatgagaaagaatcagcacaagaactttggcaattcaaaaagccagagtgtcctctttacctccaaaggagtctactagctccccagcaatggttcttaatcagtctgaaatgacagacacagaattcagaatccggatgcgcaaggaggctcattaagattcaagagaaagctgaaatccaatccaaaaaatccagtaaaacaatgtgagaggtgaaagacaaaatagccattttaagaaagaaccaaactgaacttctagaactgaaaaactcactacaagaatttcataatacaatcaaaagtattaacaagtagaagagaccaagctgaggaaagaatctcaagagctcgaagactacttctttgaatcaactcagtcaggcaaaaagaaagaaaaaatgatttttaaaaacgaacaaaatctctgagaaatatgggattatgcaaagagaccaaatctatgactcactagcatttctgagagaggacagagaataagcaacttggaaaatatatttgacgatacagtccatgaaattttccctaatctcactaaagaggttgacatgcaaacagaagaaatacagagaacaccagctagacggtcaagacaaccatccccaaagcacatagttatgagattcaccaaggtcaatgcaaaagaaaaaattttacaggcagccagaaataagggtcaagtcatgtacagagggaatcccatcagactatcagtagaccctcagcagaaaccttacaagccagaagatattgggagcctattttcagtgtccttaaagaaaagaaattccaaccaagaatctcatatgccaccaaatgaagcttcatacatgagggagaaataaaatccttctcagacaagcaaatgctgagagaatgcatttcaactagaccagccttacaagagatccttaagggagtgtgaaacatgaaattgaaagaatgacacctgctaccacgaaaacccatttaagcacatagcccacaggcactataaagcaagtatgcaattaagtctacataacaaccagctaacaacacaatgacaggatcaaaatcatacatatcagtactaaccttgaatgtaaatgggctaaacactccacttaaaagacacagaatggcaagctgaatacaaagacaagacctaaccatctgttgtcctcaagacacccatcttacatgtaacaacactcataggctcaaagtaaaagaatggagatctatcacacaaacagaaaacaaaaaagaacaggagtcgctattcttatatcagataaaacagactttaaaccaataaaaaataagataatgaaggtaattatataatgataaagggtatgatccaacaagaagtcttaactatgctaaatatatatgcacccaacactggagcacccagattcataaaacaagttcttcctggcctaagaaaagactcagacaaccacacaataatactgagagacttcaacacctcactgatagtgttagatcactgaagcagaaaactaataaagaaattctagacttaaactcaacacttgaccaactggacctaatagacatctacagaatactccacccaacaaccacagaatatatatccttctcatctgcacacagaacatattctaaaatcgaccacacactcagtcataaagccaagtctcaataaaactaaaaaaaactgaaatcataccaagcacactcttgggccacagtgcaataaaaatagaaatcactaccaagatctctcaaaactacataaatacatggaaattaaacaacttgctcctgaataactcctgggtaaacaccaaaattaaggctgaaatcaaagcattctttgaaattaataaaaataaggaaacaacttaccgaaatctctgggatgctgctaaaacagtgttaaaaggaaagtttatagtcctaaatgccttcatcaacaagttacaaagatctcaaattaaaaatctaactttgggccaagcacagtgactccggcctgtagtcccagcactttgcgaggccaaggcaggtggattgcctgaggtcaggaggtcgagaccagcctggccaacatggcaaaaccccgtctctactagaaatacaaaaattagccgggcgtgctggcaggcacctgtaatcccagctactcgggaggctgaggcataagaatcacctgaacctgggaggcggaggttgcagtgagctgagatcgcaccactgcattccagcctgggggatagagtgagactctgtctcaaaaaaaaaaaaaaaaaaatccaacttggcacctaaaggaactagaaagaaaaaaaaaaaccaacccccaaagctagcagaaaaaagaaataactaaaattaaaggcaaatttaataaaagtgagacataggctgggcgctgtggctcacgcctgtaatcccagcactttgggaggccaaggtgggtggatcacctgaggtcaggagttcaagaccagcctgatcaacatggagaaaccccatctctactacaaatacaaaattagctgggcgtggtggcgtgcacctgtaatcccagctccttgggaggctgaggcaagggaatcacttgaacccaggaggcagaggttgcagtgagccaagatcgcgccactgcactccagcctgggcaacaagagtgaaattccgtctcaaaaaaaacaaaaacaaaactgagacgcaaaaatccatacaaaagatcaaggaaaccaagagtttgttctttgcaaaaataaacatgattgatagaccactagctaggttaacaaagaaaaaaaaagagaaaatagaaataagtacaatcagaaatgataaagatgacgttacaattgatcccacagaaatataaaagatcctcagagaatactatggacaactctatgcaaggccgggcgcggtggctcacacttgtaatcccagcactttgggaggccgaggtgagtagattgcttgaatccaggagttcgagaccagcctgggcaacatagtaaaaccccgtctctattaacaatacaaaaattagccaagcatagtagcacacacctgtaattccagctacttgtggggctgaggcgagaggatcacttgagcccaggaagttgaggtggcagtaagccaagatcacgccattgcactccagcctgggtgacaaagtgagaccctatctcaaacaaacaaactaacaaaaccaacaaaactctacacacacaaattagaaaatctagaggaaatggataaattcctggaaacaaacaatctcccaagattgaataagaaagagattgaaaccctgactagaccaatatcatgctctgaaattgaatcagtaataaaaaacctgccaaccaaaagaagccccagaacaaatgaattcacagccgaattccatcagacatacaaagaagagctggtaccaatcctactgaaactattccaaaaacctgagggggaaggactcctcctgaactcattctatgaagctagcatcattagcctaataccaaaatctggcagagacatgacaaagaaaaaaaaacttcaggccactatccctgatgaatacagaggcaaatatcctcaacaaaatactagcaaactgaatccagcagcacatcaaaaagttaattcaccacgatcaagcaggctttattcctgggatgcaaggttggttcaacacacacaaatcaataaatgtgattcaacacataaacagaattaaaagcaaaaccacacaatcatctcaataggtgcagaaaaagctttcgataaaacccaacatctcttcataataaaaaccctcaatagactgggcatcaaacaaacatacctcaaaataataagtgccatctatgacaaacccacagccaacatcatactaaatgggcaaaagctggaaccattccccttaagaactggaacaagtcaaggatgcccactctcaccacttctattcaacatagtactggaagttctagccagaacagtcagaaataaaaagcatccaaacaggaaaagaagaagtcaaactatctctcttcagtgatgatatgttctatacctaggaaaccccgaagactctgccaaaaggctagtagaactgatacattattttagcaaggtttcaggatataaaaatccatgcggaaaaatgagtaacatttctacataccaataatatccaggcttagagtcaaatcaagaacacaatcccatttacaacaaccacaaggaaaatgaaatatctagatacaggtaaccaagaaggtgaaagatttctacaagaagaactataaacactgcagaaagaaattagagatcacacaaatagatggaaaaatatcccatactcatggattggaagactcaatatcattaaaacagccatactgtgtaaggcaatttacagattcaacactattgctaacaaactattagtgtcattcttcacaaaattagaaaaaaactattctaaaattcataccgaaccaaaggagagcccaaataaccaaagcaatcctacacaaaaaagaacaaagccagaggtatcacactacccaactttaaactatactataagcatggtactggtacaaaaacagacagaccaatggaacagaacagaaaacccagaaataaagccatatacctacaaccatctgatcttgtgcaagaccaacaaaaacaaacaatggagaaaggactccctaattcaataaatggtgctgcgataagtggctagccatatgcagaagaatggaactaaacccttacctttcaccatatacaaaaattaactcaagatggattaaagattcaaatgtaagacctcaaactataaaaatcctagaagaaaacctagcaaataccctctcaacattggccttagcaaagaatttttagctaagtcctcaagagccagtgcaacgaaattgacaagtgggagctaattaaacaaaggagcttctgcacagccaaagaaaccatcagcagaataaacagacaacctacagaatgggagaaaatattcacaaaatacacatccaacaaaagtctaatatccagaatctataagaaacttaaatcaacaagcaaaaaataaataaccccatttaaaaatggacacagaacatgaacagacacttctcaaaagacatacatatggccaacaaacatgaaaaaatgctcatcatcactaattatcagagaaatgcaaatcaaaaccacaatgacataccatctcacaccagtcagaatggctattatttaaaaagtcaaaaaacaacagacgtggccgggtgtggtggctcacgcctataatcccagcattttgggaggctgaggcgggtggatcacctgaggtcaggagttcaagaccagcctgaccaacatggaaaaaccccgtctcgcactaaaaatacaaaattagcaggcacagtggcacatgcctgtaatcccagctactcgggaggctgaggcaggagaatcgcttgaacctgggaggtggaggttgcagtgggccaagatcgtgccattgcactccagcctgggcaacaagagcgcaactccgcctcaaaaaaaaaaaaaaaaacagatgttggcaaggctgtagagaaaaggggacacttatacattgttggtggggacataaattagttcagccattgtggaaaatagtttggagattcctcaaagaactcagaactaccattcggcccagcaatcccattactgagtatatacccaaaggaaaacagattattataccaaaaagacacatgcactcatatgttcattgctgcactatacacaatagcaaagacgtggaatcaatttaggtggccatcaatagtagactagacaaagaaaatgtggtacatatacaccatggaatactagatagccataaaaaagaatggaatcatatcctttgcagcaacatagatggagctggaggccataatcctaagcaaataaacacaagaccagaaaatcaaatactgcatgtcctcacttatacgtgagagctaaacactgagcacacatggacataaacatgtgaacaatagatattgcagactacgggggggtgaggaggaggagaggttgaaaaattaattattgggtactatgctcactacctggatgcaatatacccatgtaacaatcctgtacatgtaccgtctgtatctaaaataaaagctgaaatctaaaaataataagtccatgtttaggtgctttagttttttgttttttcctcaaaaaaattgagttttttcaattctcttgactaaatatacctttaagaaaaactattgcaccaaatattggtggagtaccttctgatagtctttcttgacaatttaaattttcctgtggaatttctctaattcatatatttacaatcggaccacattttaagtctgttagctaccagaataacagaataagaatacctaattagatgagatgaaattaatacaattctgtgtacatagaatagaatacaacatatgctttttaaaagatgccctcaattggtctcaatgactactggcaattaaaatttgatttttaattaaaatattctaatccttatataccaaaatattagcagtgataatctacagatggcaagaatacatgtagttttcagattttcctcttatcacttattttctaaatgttctataatacataccaattttgtcattaaaaatacaaaatgtccccaaaaaaacaaacaacttagccacttctttgagtaacaatagaaccagccattctaaatacatagatgtctctaaagaaaatgatgatttaacattagcattataatattctatttagataaacagctataaaatttttagactagcatatgtgaacctattaaaaataacattagaaatacccacgcaggctcactgcatgccagcagtgacctttagaatcctcacaaataaaacacaataatctgcaactcagtctccagcaatttcagaattaaagaatagatcacctcagtactacaggcagtaatcattcaaagaaactgactcagcagaacataatggtaaaagcatttctgttgcccaagtagctgaccgtcagaaacacacagtgtctacctccatgcatagtaacagggcatcctctgttctagtcagacatccctcccacacctcaaccttgcctcccacaggttagcactcttccttgtatcatcacttaaaaacttctctgagatactactttttcattctttctcccacttcctactgtacccaaaacgagcacaaaaggcccttttgttcccctcccttcattttcaaagatttgttttgcaactgatcaccacaaggaaaagggatgaagttacaaaggaaaacacagtctttaattttcagtggtagctgttccagtttttataaaaattgtacctgccttttcatattttaacccttgttggaccttgcaccaatttccctatttgaaccagagggttctcttcatctatcaagcagagatggatgacatggccagagttcaagagctaaaacaagcccagaatctgctgccttagctccttcaccatccttcctgagtctccttgatggtccatgtaggtttccctctcaacaccaaagatatcagttttacagtattaaaaattacatgtttaacacatataataaaaagcaattccgacacaaaaagaaagaaatcactcactcagaaaagtaaagatttcgtttaaattagattgctttgggggtctgacagaacttctcattaggaagcgctgttacgtcttttccagcagcttttaaaaattaggtctgggtaactaaaccaaaaccaaatatattgaaaggatctatagttttgattcactccctcctcccccacttcaaaacagggcttggggacctaagataaacagattaaagaaggaagaagaaacacttcatatatcttataaaacattataccttaatctgcatagaatattctatcttaaggttactggaatcttgcaatgttactgggaaaaatttcccaaacccaatgagacattaaaggatagttctctaacctgtattttgtttaagaaacaaaagaccagctaaagttgttctctaccgccatacctaagtgacaatgccattttaagttggcatatatgctaaattaaaataagaaaatctaatttagtaaaatttacatcgtttccctaccctgttatataattatatccccataagtattcagcctagaaagaaaatcataaaaatgcaagaacaagctagaaatcacaattagaatttagaaaggctctaagaatcttgtttttaaaacatgtttgttttctacttgccaatcaaccactgacactatttgtaaactactccccccttcagcctcatgggggatgcttcttatgaagactattttatttcacaattgctactcatatgtgcttacttcaaaagaaccaagattttggtcaaaatgacattattaaaaatatgataatctccatagcttttaatattttcagaagaaagttcacacaaaaagaagcaacttcagttgttttaggtcaattcataattcatctagcaacatgagcttttaaaagccactcaatttttaaaccttagtatcttgtttcttcctaaattatttctacagagtaacttccattatgctactgttaaaaaaaaatcttagctgtctctgctacaatttccaaaaaaacacatcagatgtattaatatatttaattagtaaaatgttattcacatttttgtatcataaaaaaacttttaataaatctcaggtaataccagtaaaaaagcatttactgtcacatccctaaaaactattttttaaaaaatgacaacagtgtcattacaaactggtgatttaaatgatcaaacttgacttacaataggactattctttttaaaaagaaaaaaaaacatttttatggtagaaataaccaaaggcttacttttccctgtaccataaaacaatttttagaagtgactattcaaataatagtgccaacaatttcaataagtaatatttagaacaaaacagaggacatctttgagataaccaaaattaccgagatatttagtatacaaaagctaacaaagcagacaatgaatttctttaaccacacttcaattacaatataaaaaaacttttgcagtaattcgtacctttatcaatattccagagaaacaagttgttgctgtttttaccgttaaggtgatttaggttccaaatgataggatagccttgctccttaccaggaataaaattgcctttctggagaaagcaagtcaacaaagcccatgttgcctgagcaagcctgaatttctagcaaatggggatgaagctatttgcatttgttggtttaaggggggaggagtgggaggaggggactaaggggactgctaaagtaattcgtatattgtctgtggactgtagagacagtgatcatcagtcacctgctcaaacctccttcactcctgccttcagaagaaccaaaggtccttccaaaggttacccggggtcagagaaactagaaagaaatgagaagacatgcaaaatctaactgctaacccactgcatctatagacaaagttatccccacctgatcacatgtcctaaaaaccaagacattttaatagtctcaagagaacttgctaaaatatatcatacaacagaagcaagaaagaaaaatctccagactctgcttgcaattgttgcagtatttagctggaacacttaaaacagaaaaaggaaattttttttccaagatgcttctttgcatcataatagccatctcatttgcacaagcaaaacatttgttccaagctgttcatatgaaaaagaaaatatcagctgtattaaatttcatagcttttgagtcagtcatttaggttgacagcatttctaaccatttcatttataccaaacaagagtactgaatatactcagtatattagtccatattttattataaactacattaagggcaaaaatctacgtaaatactcaagtgtttattcagaagccttctagtgggactaacacacctcgaactttttacaaccttagttatatgcacctctgccacttttgacctactgttacacagaaaaataaaaagtgctgctttatgtggctgtaactgaacatacacagtcctacaaaaacagggagaaagttggtgaatacatgcattaaaagctataaaatcttaattttaaaatttagagagatgaagcacaagttacagataccacatactcctctctgcgcatacctgaacaaagagcaaaaagcagccacaatttctagttttgttttcttaaaaatgagaatgggatgggagtgtggaaagtagacctatttcttgtttgctgaacaaaaaaattcccaaaagacaaactttgaaacagttaagaaggaaaacattagagtttttcaaaatagaaaaaaaaaactactaaagtgaccagttacatttttttaaaacatcaaacgtttagatttttaaaacccactcccttaaagttttaattaagaaaaaactaaaccacacacatacttgcccataaaataaaccagcattcaaagaagcagctaacactgcccaaaataattaattacctttaaggtctatttaagtaagttgtgaaggaaatgccatgttaccactgagttccaattctaaataaagctgtatctgtgagatgtagggggacagaagacccaataaacgggaaggttttatcaaaaagagttaagatggtcactggcagcctacgatgccaaaggacaggaatgctttgctacactttcctgattctaggttttcccctcctccacggttccctttggaccagaagaattcctctatacccttgggatcctgcaaccttatactcggcatctggaagtttgctgcttgccctccttcctagtctgtaaggtcacaattgcttaaagaattaggctacaagatgacacttcagaccagtgtaggtcattaagttacaatcaatgatacataaatctgaagctaaagttaaaaactttgaacatcccataataatgaaagcaattaatactgggggcaaacttttaaaagaatcttttacttcttagtttttcaaaagactaatttctccaaagactaataatttgtatttatttattatgttaataaataaaattatagagacaaaatagtaatgagtttacaaactttccccaaaaaagacaagaaaaataagagattttaaaaaaatttttcacatagccttcaaaacaaggtagtcctagttctgattctaagttgctggattatcctgtcttgctctttcatgtattaaatatttggactttaatgaaatgactggccatatactcctataagtatatatgcactggagacatgggaatggcaatatgagggaaaaaacggtagcttacagggcattcctaaatttctattattttttagagagaactaaaatataagatacagaagaggggggagcacgttgaaaacggaaaacggcaagatcaaataagtttgcaagaagaaaatctacaatgggcctcgttttcatttgcgtgattcagccttctgcaagttgccaaggacacagcagcacatatgttcctttcctctttttcaccagacactctgtacgggtctcgtgagtaaatctgatgagctgtgacagcaccaaccagaagctaagggctttgaaagattgtagggtcataacaagagctaagaaaagaaaacttaaataaacaagagggaaaaagccacacagcttgctgaattttctatccaagtaagtttctcagtgatttttttctaccattaataagcctaatgcaaatttttgctgtttctgatcacagaagtatttacacagtttttaaaaattgttagaaaaagttttaaagtaaattaaactttattactatccttgaaaaggaaaccagtaaagcttaaataaacatttatttaatgtaaagtcctatcaaggagcattcatagatgcctcgttacattttttaagaaactaggcaactgtatttctttagttattaattataaagttttaagtgctacgaccttaaaatattttggaaaagctgttatataaaagttgagagcaaacatttccagtgtttttaagaaatattcaaagtattgtcatttgaatgatgtgtttaaaaaaaaagaatagaaacattcaaaataaacaaaaatacagatttttttaatttatggaattcaattaatttaatattatgtgtgccttttgaaattatttaactctaagacatttaaagtatttaacattcaagtcaataaataatatttctctcagttaaaaaaactttaacattaaaaagcaaactactggaaaaaagtttttacttttatgacacagcgttgatatgtgcaataaatgaagcactcaaatcaataagaaaaaacacgctaagagaaaaatgggaaaaggtgattagcaggcaaactataaaggaatattaatgaccaaaaaacatggaaagaaaaagattcaatctcactagtaatctaagaaatgaaattttggaaaacaattgtttttttaattagcaaaaaataacaagaaaaataattcccaaggttggccagagtaggaaaaaaacactttcacctacttctgaggttggcggaaatgggtatacctttctgaaagaccacttgtcagccttaaaaacataccccttaacctagcaaagttatctatggaaacagagaggtatacaaagacatatacataaaagtattcatcatatcatctagtttaataacaaatctggaaatattctaaatgcttaacaaaatagagattgggttaagtaaattatggaacagccatacaatggaatgcagtgcagacataaatttcaatttatagagatattttacatgggaatacagtcacaacagattatgaaaaaaaataggcaagaaagcagaatatacacaataaccccttttcaaacgaaaattgtcattttatttactttaaagcacaaatcctatatacaaatatattcttgttttttttaaaaaaaagccacagataaaagcaaaagtccccattaccacttcccttaccattcaacatccttcgcagaaataatcagtattatagatctgatatatagccttccagattttttttacatatttacacacatatttctaaaggtacatatagaaatacatatttattttgttttgacataacagtattacactgtatatatttgaggggacttacttttttcacttaatatatcttagagagctttccttcttagtataactagaaacactctcattctaaattattctataattattctaaagaacaactataccataacttatttcaacatttctccactgatttgaccatgtgtgtgttttctaaagttatatgtgtaagagaaaagaaaagtagtatgaagccaaataccacactgcttgcgatagttgtatccaaaagcttttcccaatattttgctttgagcatttactttttctattagaagaaaattgttatgttaaaaattagaatgaaaaataattagaaaaatattttgctttcaagaatatacaaattatatctaaaaaactgtacttttattttatagctgacatctaaataaatggtgtattgcctaaatgttttctctactcaaaaagagtatttcactgtactaaccactattaacctatccataattaataagcgatgcctgaaaaaaagcaaaatgaatcacacatgcattatctttgggtgaacgccaactacaagtttttaaccatactttccccagaatcccaaagttcttctggggacttctgggaatatttataaaacagattgtggcagcagtgggcatacatttgtttctactcttaactgcttccaaattctactttaacatggtttggactatttgtactcaatattcaaaaggctatcaagaaaactgctttataaccttgaattacttgtgccatctgaaatccttaatttctcacaatgaaagtaaacagtgtatttgtatatgtgtggttttgccaagacatcaagattcaacaaaacctacaaacagaactaccatggtgacactgtaaaacaccaaagatgacatgaaaagattaaagtagctagattttaaaatgacagattacagtcagaggagaaatactgacagctgtattctcaacagcaataatggaaaccaaaagtcaaaagaatgtcttcattgtactgaaagagaatggctgccaacctggtattttaccatcacagaaagtgtctttcgaggacaaagctgaaataatgacatattcaaatgaacataaaccaagacagaatgccactagcagaccttcagtaaaggaaattctgaaggatctacctcagaaagaagaaaagtaatcccagatgaaaggtctgagatgtcaagaataaaaagcaaagaacatgctaaatatgtgggtaaatctcaacaaacattgactatgtaagtaataatagtaatagtccatgagattttttaaagatacaataggtaaatcacttcaagatggctgactggaggcttccaatattcctcttctccacaaagaagaaccaaaatattaagtatataatcttcaaactgagcatctaagaaggaacactggaatctaagaagtaagaggaaacacccgaggcatgaaaagagaggaacgcaagacagccagtttggccaagactggctgagagcccgaagaggctcttcagtgaggggaaagggtaagtgagagatccacagtggtcaatattcccaccatggactccgccagccctagccacagaaaaacccatcacaggccctgagaacagcttaaggacctgcctagagatcatgcaacatcattgctctagaaagtgagcccacgtcccaagtcctaagcaactgtagcacagcgccattctgagacttcagcccccaccacactgcatcctgccctgaagcccaacaacccctacatctccacatccctagagccccaccaacatctcccaacatccacccagagggctgcagtggcacaacaaccattagacccagcgaagtggcaagatccccagcactctaccatacacagtgtcctgcaccctggggaacaaatggtgcagcacattggagaggctgcccaccccgatccaggacaaagggagccaaagcacgtgctccatagagtctaagaaccacctacctgggaggactactactgacagcaaccttaatccctccacagtagcagggctccttcacacagactctgagaacagactctaacactgcccacagcagctgccactgggggcctaagtgtgcaccactagcaattaccccccacccccagaagcaaggccacctctgcgtacttgcacactggttttccctgctgctaccacagccgccaccaccaggggctaaagcacatgcccccaccagggcctgagaactgcctgtctgtggctgcagctctcccaagcagcagtacggaggcacacttgcatacacacttgctctgcctgctcaccactgctgctgccacccaagcactgcaccaggggtccagggtattgccccaccctgcccaccacagccagtgcccaaatacaccaccagggacctgaggacaggcatggctagctggcactgctctctcattgcccaagtatacctcccgggagcttggagactgccccgccctgaccatcactgctatgcactcctcctggaggcctgaagatgggcccagccagcctgccgctgtcatctcagccagcacccactggcacatacccgttgggggcctgaggactggcccacccagcctgttgcaggcactgttaacatgaacacatgctgctttggggcccaaaagtcgtcctatcaccattagcgccatcacctacaccacacacaccacccagagaaccaaggacctacccgcccacccagcccaccactgccactgctgatatcctatcaagccacctgcaagcccaaattcagccagtttggaccagatgacaccggtgtccatatacactgaccatgggcccaagaacaggcacgctcggccctctactgccatcgctggggcctgaggactggcccacctggcgtcctcatccacagcaaaacctcaccacagcctcaaacaacaactgcagcctaagccattgaggaaattacaaacactaatgacactgtttacagccaaataactcatagagaaacttcactacttcatgcactcagaatcaaagctaaagtatcctatccaaccaacacataaatacatcttcaaaaaaaagatttcccctataaaagccagtccaaaaaattagaagcggcaactattatgctagatgtgcagacatcaatgtaaagacccaagaaatatgaaaaaagaaggaaatgtgacacctccaaaggaacacgataattttccagcaacagattccaatgaaaaagaaatagttgaaaaagaattcaaaataatgatattaaagaagctcggtgagatacaagagaacacagataaataatacaaagaaatgagaaaaacaattcaggttgtgaatgagaaattcaccagagaaatagatagcataaaaagaaccaaagagaaaccctagaaatgaagaattcaatgcattaaataaaaaattcctttgagagcttcacaatagattagagcaagcagaagaaagaagctcagaactggaagataggtcctttgaaatagcccccatcagacaaaaaaaaaagaataaagaaagcctacatgacatatgagacaccataaagcaaacaaatatacaaattttggatgtttcaaaagatgaaaagaaggccaaaggcagagaaacctatttagcaaaatagctgaaaactacccaaacgaaaagagacatcacaacaaaagctacagaaatacaaaagatcatcagagactattatgaacaactatacactaacaaattggaaaccctagaggaaatgcataaatttctggacacatagaacctatcgagactgaataaggaagaaatagaaaaccttgacagaccaattgacaagcaatgagactgaatcagtaataaaaagtctcccaacatctttgggatgctgggatcagatgacttcactgctaaattctaccaaacttataaagaagaacaccaattctcctcaaactatttcaaaaaattgaagaggtgagaattctccttaactcattctacaaggccagcattaccctaataccaaaaccagacaaggacacaaggaaaaaaaaagaaaactacaggtcaatttccctacgaacatagatgcaaaaatcctcaacaaaacactagtaaactgaatccaaacataatacaccaagatcaagtaggatttgtcccaaggatgcaacgataagttcaacatacacaaataaatgtgatacatcatatcaacagtatgaaggacaaaaaccatacatctcaacagatgcagaaaaagcatttgataaaatctaacgtccttcatgattaaaaactctcaacaaactaggcacagaaggaacactactcaacataataaaggctacatatgacaaaaccacagctaacatcattctgaataaaagctgaaagcctttcctctaagaactgcaacaagtcaagaatgcccactttcagcactcctattcaacatagtattggaagtcctagccagagcaattaggcaagagagataaaaggaatctaaatggaaaaaaggaaggcaaattgtgcctcgtgggctggctttggctcaagtggttacttcctcacacgactttctaaccactaaattgtccctctttgcaggtgacatgatcttgtatttagaaaaacctaaggactccaccaaaaaattcttagatctaataaacaaattcagtacagttgcaagatacaaaatcaacacacaaaaatcagtagtgtttctatacaccaataatgaaatagctgtaaaagaaattaagaaaattccacttataataaccacataagaaataaaacactgggtgtggtggctcacacctgtaatcccaacactttgggaggctgaggcaggaggatcacttgagtccaggagcctgggcaacacagtgagaccctgtctctacaaaaaaaaacacaaaaaacaaaacaaaacaaaaaacatttttttaattagctgggcatggtgacacatgcctgtagtcccagctactcagaaggctgaggtgggaggattgtttgagcccaggaggtggaagctgtattgagccgtgatcatgccactgcactccaccctgggtgacagagcaagaaccagtctcaaaaaaaagagagaagaagaagaaagaaaacacttaggaagaaattttaccaaggaggtgaaagatctctacaagaaaaactacaaaacgctgatgaaaaaaactaatgaggacatgaacaaatggaaagacatcccatgcttatggatcagaagaattaatattgttaaaatgaacacactacccaaaacaagctacagattcaatgcaatctttatcaaaataccaatgtcactcttcacagaaatagaaaaaacaatcctaaattttatatgaaaccaaaaagagcccatatagccaaagtaatcctgagcaaaaaaaagagagcagtatcacaccacctgacttcaaaatacattgcaaggctatagtaaccaaaacagcatggtattaatataaaaacaaatacattgacctataaaacagaaaacccagaaataagcccatctatttacagctaactgatttttgacaaaggcgccaagaacgtacattgggacacggacaccgttttcaataaacagtgctaggaaaactggatatccatatgtaaaagaatgaaactaggccaggcgtggtggctcatgcctgtaaccccagcactttgggaggccaaggcaggcagatcacctgaggtcaggagttcgagaccagactggccaacatggggaaaccccgtctctaactgatgggtaacccagctgctcgggaggctgaggtagaagaactgcttgaacccaggaggcagaggttgcagtgcaccaagattgcactgcactccagcctaggtgacagagtgagactgtgtctcacaaaaaagaaaaaaaaaaagaaactagtcccctagacccctctctctcaccatatacaaaaaacaactcaaaatgcattaaagacttaaacataaggcccgaaactataaaactatgaaactactagaaggaaacataggagaaacagttcagcacattggtctaagcaaagattttatggctaagacctcaaaagcacaggccacaaaaacaaaaacagacaagtgggactacataaaactaaaaagcttatgcactgcaaaggaaacaatcaacagagtggagacaacccttgaataggagaaaatatttgtaaactatttatcccacaagggactaataaccagaatatacaaggaactcaacagcaagaaaaaactaataatcccttaattaaaaagtggacaaaggggctgggcaaggtggctcacgcctgtattcccagcactttgggaggccaaggtgggcggatcacgaggtcaggagatcgagaccatactggctaatacggtgaaatcccatctctactaaaaataaaaaaaaaaaaattagccaggcatagtggcacacgcctgtagtaccaactactcgagaggctgaggcaggagaactgcttgaacctgggaggcagaggttgcagtgagctgagatcgcgccactgcactccagcctgggcaactgagtgagactccgtctcaaaaaaaaaaaaagtggacaaaggatctgaatagacacttctcaaaacaatacatacaaatggccaacaagtatatgaaaaaatgctcaacatcactaatcatcagagaaatggaaatcaaaaccacaatgagttatcatcttactccagttagaatggctactattaaaaagacaaaaaaaaagatgctggctaggatgcagagaaaagggaactcttttttttttttttttaaatagagacaaggtctcgctttgttgcccaggctgtagtgcagtgacatgaatatagctcactgggatctcttagccccagggctcaagcaatccttccacctcagcctccccagcagctaggactataggcacgtatcaccatgcccattttacctttttatttttttgtagagacagagtctcactgtgttgcccaggctggtctcaaactcctggcttcaagcaatcctcccacctcggcctcccaaagtgtagagattatagggtaagccactatgcctggccagaaaagggaactcttatacactgttggtgggaatgtaaattagtatagccattatgaaaaacagtatggcaacttcttggccaggcgtggtggctcacgcttgtaatcccagcactttgggagaccgaggcaggcagatcacttgagactaggaggtcgagaccagcctgggtaacatggtgaaacccggtctctactaaaaatacaaaaattagccaggtgtgatggtgcgcacctgtagtcccagctacttggggagctgagacaggaggatcacttgagcccaggaagtcaaggctttactgagccaagatcacaccactgcactccagcctgggtgacaaagtgagaccctgtctcaaaaaaaaaaaaagtttgagccttagtcagaaaaagataacaaaaacatcatccacacaaaatctggtcatcagataaagcagacgttaaggttaaaaaaaaaaagatcggccaggcatggtagctcacacctgtaatcccagcactttgggaggccaaggcaggtggatcacctgaggtcaggagttcaagaccagcctggccaacatggcgaaaccctgtctctaataaaaatacaaaaattagccgggtgttgtggcagacgcctataatcccagctactcagaaggctgaggcaggaaaatcaattgaacccaggagacagaggttgtagtgatccaagttcacaccactgcactccagcctgggcaatggagcaagactccgtttcaaaaaaaaaaaaagaaaaaaaaaatcattaggttggtttccccagcaaaaggagaaaaaccataaataaatcaggttaccgtggaaggttcagttcaccaggaaattataataattcaaaactggtacacacttgataatacagccacaaaatagataaagcagaaagcaaacactgaaagaaatacaagaaaaaacaaatccataattatatgaagtctgtaagggaaaaaaaatctgaataacagtagatttctcatcagaaaccacagaagccagatggaagttgcagaatacttttcaagtgtgaaaagaaaagaattattggccaggcaaggtggctcacacctgtaatcctagcacgttgggaggccgaggcaggtggttcacctaaggtcaggagttcgagaccagcctgaccaatatggtgaaaccccgtctttactaaaattacaaaaattaactgagcgtgatggtgggcacctgtagtcctagctactcaggaggctgaggcaggagaatgacttgaacccaggaggcagaggttgcactgagccaagatcacaccactgctctccaggctgggtgacagagcgagactccgtctcaggaaaaaaaaaaatcaaaaaagaaaaaaatgaaaggaattatcaacctagaattccatgtccagcaactatccttcaagaatgaagaggagggctaggtgtggtggctcatgcctataatcccaacactttgagaggctgaagagggagaatcacttgagtccaatagttcaagaccagcccggacaatacagttagaccccgtctctaccaaaaatttaaaaaattagcctgggatggtaacacgtgcctgtagtcccagctactggcgaggctgaggcaagaggatcaattgcttgcacctggagagttgaagctgcagtgagccatgattgcaccactgcactccagcctgggtgtcacggcgaaactctgtctccaaaaaacagagaatttgttgccacccaaccctaaaagaatggttaaaagaagttctctaaacaggaagaaaatgataaaataaggaaatcttgaaaatcaggaattaagaacaatttaaagggtaaaaatgtaaataaatacaacagactttccttctcttgagttttctaagttatgtttgatggtggaagcaaaaattataatactaatgtggttctcaatattgaagacaattatatataatagagggtaaagggacataaagtgaggtaagatttctaaagttcactcaaagtgaatgtcaactggggtaaagacagaggaagcagatctcacaaagtattgggaaaccactttttctttttcttttttttttctttttaacactgtacatttcctatttactccttgactctctaaatctagctttttaaagaagccgagtaaccacagttttactaagaccgctaacgagttctcctcttgcttgacttttacactgcctttgataatgttgagtactttctccttaaaatcttttctctcctgttgccatggaagccaacctagtgatctcctacatttacgtatacttttttccagtgtcctagattgacttctactacctattccttatttttgtgcttctcaaagttcaggcttcaaaccatgtgcactggaaacaactgagccccacttcgaacccacggattcaaacccctggatgtgagttcccgagcactcccttttaacaagctcccccaggcaattcaagagtgataattactgctttaaatgtcgacccacaaggttctgtcctggtccttttctacctctacttgttatacacacacaattaaaacacactcaaaacttccaccacttgctgctatcaacaaaataagtaaactgctcaccctcccatcccaagcacctataatcccacctggcacaaagaatatttatctgagggaacatgatgactctcaaacctgctttgtcaacaagacctatcttttttaggctccagatctgcatgtgcagctatccaatgaacatgtgcacctggatgtcccaaagttaccctgaatcagttaggattgagttcagctagcagtaatagaaaaacctaaaagaacagtgacttatataacatagaagtttatttctcacaattgtctgaaaacagataatatgggctagtatgaaagctctgctccaccaagttctcagggactctggctcctggctgctttccacccactccacagtgcctagcatatggtccccatctcatgctccaagatggagctccagtcaaaaccacattcgtaacagcaggataaaagcagaaagaaggaaaaggaaaggacatgctcatctctctataatatactttctggagaaagtacacactatgtgtacttttattccatcaatcaggacttagtctcgtggccataccatactgctaggagtctgtatgttaggcagccaattgtaatactaagaaaaaaagagagaagaaatactggaggacaacagcattctcagccacacgttccaaacccactgtgttccaaagtgaactcgtcagtttttaggataaactggaattttgcacttttgttatgtatccatcctacttttatctccattctgcctggcaaactcctgcttctcatctaatactcacatcatgcaccttttgtgatgctttcctttatgcaaccacctttccctccagccaagactggaagactttgggccacctccacatctagcatacatctctatttttgcattgctaatactatatcttctttttacaaatctatgcctccatgcatccctcttccattagaaggtaaacttcttgagggtagagactatgttttatttatcttaatatcatatacacacagatctgtatcatactaaattttacaaaatcaaccattaatatctacttcctagacttatggaagcaggaaactggttaaagatgtacctaataaaaaggacactgtggtatacagtactgtagtataatggaatgtgttaaagtcccgaattacagatgattctaacagccattgcaagaataatatggctataagctcttacctagacattatactcctctgcacactttgcgtacttattttctacatctatctttttttctcataaaaataaatatacttagtagcgttagttttttaagtatgtttatattcaatcccactaagttgatttttcatttatttatttttttgagacggagttttgttctcgttgcccaggcaggagtgcagtggcgcgatctcagctcactgcaacctccaccctctaggttcaagctattctcctgcctcagcctcctgagtagctaggattccaggcacacgccaccgcgcccggctaattgaatcccactaagtttatattaacttaggccaatgattgggttctatgcttagaccccacttaagcctcagcagttactccatcatagaagaccaggttaggcatatctaagcccttgaaagagtcaccaaggaacatcaacatgttgacagcttttctctgaaagaaaatatctagaagatcatagtactcagcttaggaaacaccgttacaactaataaacattaccatgactaaaatagcatactaatttatgatggcttccacagagtcaaaaattttcactgtagatttaacttaaggctatcaaagtgtcaatttaacttaaaaacaggacaaaaatcatgtaagacatgtttataacagttgttaagcccagtcttttaaaaaatatctttgagatatgaacaatggaataccatgtataatttttaattgaatatcaactataaaaggagctgagtacataccaccccccttgcttatagcaacaagacctcaatggtccaaatatgacttttagctttgtccataatctccagtgtggactggaactcagactatgatgctgcagtgacctcaagaattctaatcatagctttcctttacctccagttctctagcctggacagcgctttgttctgtctgccaccagttggggcatgtaccacctggtaccaccaacgctaatcacaatgccaccaatgacagttacatctaacttcaataaagtagaagaaaaagtagttaattattatcttaccactagttcctgggggttgtaatacatctcctgtcaggcgacaccacccagctgggaaaatatctcgagaatcatacttgcaccagtaatcaaaagctccactccagccatcaaatgtgatatgaacttcatcccctttaacatctccaatggtcgcaggacagatgagatacgggttctttttgtcaatagcttccagtttcatccccactttaaaattatttagtgggggctttggtggttcctatcaaaacattaaaaaaaaaaaagatttcattgttaagatgtattaagactcatgtgctcgaagtgaaaagttgcgtattctctcacaacccttagcaaccaaaaattaagctccatgtttaattatcaattaatacaggaagacaacagttctcacagatctgaaactctgctctccaacatctcatattttctctggagcagagtcaagaacctggaaagaaacaaaaccagccgggttcattcattcaagaaatatgtattatctactatgtaccaggaatttaagattcattgatgaacaaatatatcaaacatccctgctctggtggagcttacattctaatgctggtgatagtagtggttgcggacagggaaaagcaatcaacaagaaattttacaacaggcagtcaaacaaacctaacaaatatgtaaattggtgtgtcaaaaagtggtaagtccaaagaaaagaaacgacatcagataatatcctaaaagaaactcaaagtataagaattctaaagaaaatgaataacttaaaatttaaaaaaaaaaaagaaactgtaagtataaaatacagacacaagaacatgaaagtcatatagtatggggtcatttataatacccaatccagaaatcaacattttaaaagtattagtcacaaaaaggttaaagcacgtaaatgttaacaggattgctaaaaagcccaagtgttatgttaaaagcaacatcttttctttcaatctgcttttcatcctactaaatggcaccatcacagcaacccagtcacctaagccaaaagactggaaatagtaatcctattctactgacacttgttcaaattaaaagagaaaagaaaagaatttaaaaaaaagtagtcctggactggtgattttctgccctaatgaacattacaatcacctgtgaccacaccaccagagctaataattgatctatggtgggtcctgggaagcagcaatattttaattatcagggaaattctaaggtgcacttgaggttgagaaccactaccctagattcatccctttcacttacccataattcaattaaaaaccacaacctcccaatcagagctggattttaaacctaggcagtctgtctcggagtcacctccttggagcaccctaccccagcatctgcctggacaactccaattcacccagtttaaagcccagttctcctagcttccttgaatgcttccctgaccaacccctgcccactcctaggcccagttccaactgagccactctcatcttcaattgtagtatcactatagaaatgtgttcattcctctatgagactaagagattattaaaaacagctattcatattattatttccagcacaataaccaaaagcaagcaattttttaaatgagagaaccaaggaatcaccccaaaacagtaaataagctctcaactaattctctcatcaatttaaaaaatatatctggtaggttggtttctttttcaaatgccccccttaaaacccatctcatcaccctgtatttttctattgttactctttacacccttacgatctggaagctccttaattattagcttccaaagtccttttaattacatattctttttttaatttttatttttatagagatgagggcctcgctatgttggccgggctggtctcgaactcctggcctaaagtaatcctcccacctcagcctctcaaactgctgggattacaggtgtgagctaccatgccaggctgaattacatatcttaatttgattcttaaaaaccaccctgggctcaaacctgtaatccctaattcagcactttgggaggccaaggcaggtggattgcttgagctcaggagtttgacaacagcctgggcaacaagacgaaacctcgtctctgcaaaaaatacaaaaattagctgggcatggtggcagcacacctgtagtcccagctacttagtgggctggggcaggagaatcacttgagccccggaagtcatccaggccgcggcgagccgtgttcttgccactgcactccagcctgggcaacagagtgagactctgcctcaaaaaaaaaaaatccaccctgaaagctggcaagtcaaaaggtagatgattaaagatcaaagtatttgataaatagctggtaagtaagaagcagtgttacatgaaagggctaaaggttaactgcctgttactatgtatgagaagaaaatagtggggaggtaagctgcatttaacaaagaataaacacggcagttgacaagtttgtgctagatgctcacagaatgcagaaaacattcaaggcacacataaggatcccaggaccttacactgtcttataacagactgagactttctgtagcaaagcaaactaagttcaaatggcaatgtatattttctgcaacaaaacaattaaaaaactggaataagcaatgcaatagaactaattttaagattcaaatatgtaacctaggccaggcatggtggctcatgcctgtaatcccagcactttggaatgccgaggtgggcagatcatttgagcccaggagttagagaccacctgggcaacttagcaaaaccctatctctaaaaaagtataaaaattggctcacacctgtaatcccagaactttgggaggctgaggtgggtggatcatgaggtcaggaggttgagaccagcctaaccaacatggtggaaccccgtctctactaaaaatacaaaaattagccaggtgtggtggtgcatgcctgtaatcccagctactcagtaggctgaggcaggagaatcgcttgaatccaggaggcggaggttgcggtgagccaagatcatgccattgcactccagcctgggtgacagatcaagactcgtctcaaaagaaaaaaaaaaaattagctgggtgtggtggtgcatgcctgtagtcccagctactcagggggctgaggcaggaggatctgcttgagcctgggaggtggaggttggagtgagccaagatggtgccactgcactccagcctgggcaacggagtgagatgctatctcaaaaaaaaaaaaacaaaaaaaaacaggaaggaaggaagggaggaagggagggaggaaggaagggagggagggaaggacagggagggaggaaaggacagggagggagggagggagggagggaaggacaacctacagaaagggagaaagaaaatactggcaaactatccatcacaagagattaataactagaatatatagggaactcaaacaactcaatagcaaaaaacaaataacctgattttaaaatgggcaaaagacctgaatagacatttctcaaaagaagacacagaaatggccaagagatgcaaatcaaaaccacaatgagatgccatctcaccccggttagaatgactattatcaaaaagaccaaaaaaataacaaatgttggtgagaaagcatagagaaaaaaataaaactaccaaatgacccagcaatcccacttctgggggtacataaccaaaagaaaggaaatcagtatattgaagagatatctgcactcccatgtttactgcaacactattcacaatagccagatatggaatcaaaagtgtccatccatgaacagatacttctcaaaagaagacatacaagtggctaacaagcgtatgaaaaaaatgctcagtatcactaatcattagagaaatgcaaatcaaaaccacaatgagatggcctggtgcagtggctcatgcctgtaatcccagcactttgggaggctgaggtgggtggatatcctgaggtcaggagttcaagaccagcctggtcaacatggcaaaaccctgtctctacgaataatacaaaaaatttgccaggcatggtggctagtcccagctacttgagaggctgaggcatgagaatctcttgaacccgggagacagaggatgcagtgagccgagattgggccactgcacttcagccttggagacagaatgagactctgtctcaaaaaaaaaaaaaaaaaacccacaatgagataccatctcacaccagtcagaatggccattattaaaaagtcaaaaaacagcagatcctggtgaggttgcagagaaaagaaaatacttatacactactggttggaatgtaaattagttcagccactgaggaaggcagtttggagatttctcaaagaacttataacagaattaccattcgacccagcaatcccattactgggtatatacccaaaggaaaatgaattgttctaccatagacacatgttcgcgtatgttcattgcagcactatttataatggcaaagatgtggaatcaaccttgatgtccatcaatggtgggctgcataaagaaaatttggtacatatataccatggaatactatgcagccataaaaaaggacgagatcatgtcctctgtaacacagatggagagctggaggccattaccctaaaggaacagataaaccaaatgctgcatgttctcacttacaagtgggagctaaacagtgagtacacatggacacaaagaggtgaacaacaaacaccagggcctacttgagttgagggtggaaggtaggaggagggtgaggatcaaaaaactacctatcggctactatgcttattacctgggtgataaaataatctgtgccccaaagccccccagcacataatctatccgtattacaaacctgcacacgtaccccatgtacctaaaataaaagttggagagaaaacaaaaaaaatcaagtgtccatcaacaggtgaataaagaaaatgtgatatatatacacagtggaatattatttaactataaaaatgaaatcctgtcaatgcagcaacatggatagaactggaggtcattatgttaagtgaaatgcttttaaagaatttggtttgtcatcatcatcggttctttaataacttcctgaacacaaaaatataatttgcaaaagcaatagctaaaataaacaaggaattctcttttacggtgagacaaaaatggttctattctagaagatggctagcaaagaatgctcttttaaccacctccctttttttttttttttttttttttttgagacggtctctctctgttgcccaggctggagtgcagtggcacgacctcggctcactgcaacctccacctcctgggttcaagcaattctcctgcctcagcctcccgagtagctgggattacaggcgcgtgccaccacacgtggctaatttttgtatttttagtagagatagggttttgccatgttggccaggccggtctcgaactcctgacctcaggtgatccacccacctcggcctcccaaagtgctgggattacaggtgtgagccactgcgcccagcctttatatttattttatttattttttttcatttctattttattttattttacttttacttttataaaagacagggtctcctcactatgttgcccaggctggactcaaatctcctgggctcaagcagtcctcctgcctcagccttccaagtagctgagactacaggaacgtgccaccacatccagcttttaacctcccttcttgattacctacaatatggttctccttaaaggctatttcttcccatgtcccacaaaatccgaaaccagtctcagcattctctgcattactcctctgcctggggaataatcctactcttgtagcctcatggttcactgtctgccttccttcagatctttactcaaaaggtaccttctcagaccctcctggccaacctgtctaaaatgtcgacctctcttctaaacatgtgagagtataaaacataagatacactttctttatttagcatatctattaaacatttccccaagtagaaagtaagctccataagagcatattttatgctttgtttactgctatattcccagtacctgcctctgaccacaaactaatacatgaacttctatctccttatttttaatcaactacttatttgacctcaccaataattttagtcctttaaccttcatttattcatttacaaatatttacttagtatctactatattccggacactactgaaggttcttgggatatattaacaagcaaaaaagacaaaatccctccctcacagcacttacatgctagtgaggagagacaataaacataatttaaaaagtaaaacacatacattagaaatgataaatgctatgcagagagagagagagagagaacagcacaataggaaaaatccagagagaaatgtaggaggggttgtacaactttaaatagagaaattaaaacaagtctcatatagaaggtgacatgtgagcagaaatctgaaggagggaaatggacagaaccaaggccctaaagcaggagctgtgtctgaaatgttcaaagaacaccaaggaagttgagtgtgggtaaaatgtaagtaggagagcagtaggaaatgaggtcagacagataatgaggggtcatatcatatatagttttatagatcactgtaaggattctggcttttactctgagtaaaacaggaagcccctggaagagtttgaacagaggagtgatataatttgacttatgtgggttttttgtttgttttgtttttgtttttgagacggagtctcactcttgttgcccagactggagtgtagtgtcgcaatctcagctcactgcaatccctgcttcccgggttcaagcaattctcctgtttcagccacccgagtagctgggattacaggtgcgcaaccacaatgcccagctaatttttcaatttgtagtagagacagggtttcaccctgttggccaggctggtcttgaactcctgacctcaagtgatccacccatctcagcctcccaatgtgctgggattacaggcgtgaggcaccatgcccggctgtgatttacattttaaaaggaatactctggttgctgtgctgatgatagcctgtaaagttataaatgcagagaccagtgagaagctactgcagtaatccaactgagattgaaaaagacagcttgtaccagagtgttaacaatggagacggcaagaagtggttggattttggatatacatttgtccctcagaatccacagaggactggttccaggatccactgaagataccaaaatccaaggacactcaagtccctgatataaaatggcacagtatttgcatatagcctatatacatccccccatatattttaaataatctctagattataagtaatttaagtaatctctagattacttatgatacctaatagaatataaatggtatgtaaatagctgttatactatatttttttcacttgtactattttttactgtattttgggtttgtttttttttaatattttcaatctgcagttggttgaacccatagatgcagaacccgaggatatggaaagctgactgtattttgaaggtacagtcaataggatttccttatggaccagatgtagggtgtgaaagaaacaattaccaaggtttgaggcctgagcaactagaaagatagtttcccctccctgagatagggaggttaacaggtggaactgtttgagatgtccatcagacatccaagtggagatgtagagtaggtagctggatatacaaatctgagttgggagtaagaggtctggggtagaaatacaaatttgaaaatcatttgcatataaactgtatttaaagccagataattagatgagctcaccaggggattaatacaggttagggtttctcagccttggcactactgacgtttggagccagaatgggtgtgcgtgtgtgtgtgtgtgtgtgtgtgtgtgtgcgcgtgtgtgtgtgtatgtgtattctgtgcattgtaggatgtgaagcagcactcatatctaggttacaaagcatcatttcactactctcttctcagcatccaaaaccaacttattcccttgtctttgccctgttattccaaaccttagttcaatatcaccatccacttcacctatttatacttagctgctgctatggtttggctgtgtccccaaccaaatctcaacttgaattgtatctcccagaattcccacttgttgtgggagggacccgggggaggtaattgaatcatggaagccggtctttcccatgctattctcgtggtagtgaatacgtctcacaagatctgatgagtttatcaggggtttccacttttgcgtcttcctcattttctcttgccgccaccatgtaagaagtgcctttcacctcccaccatgatcctgaggcctccccaaccatgtggaactgtaagtccaattaaacttttttctccccagtcttaggcatgtctttatcagcagcatgaaaacagactaatacagctgctgagcactgctgcagcaaagtccctcccacatgcttattacatgtagtgacacacatttttacccttcatccttagctaagccctccaaaatactgtcatgtgtccctagaccattccctctcccatcccgtatggcagctgttccaaaccttaaccattctccttgagataaatgatgtagcctcactatatgtttgttattttgttaactgactttatccccaaccagtatgtatgaattttcttccagcctttgccagtttcctactttgcagaaataggaatttgaggttttgtttttttgttgttgttgttttgttttgttttaaatcagggtctcactctgtcacctaggctaaaaggttagcatgcagtagcgagatcatggctcatggcagcctcaacctcccagactcaagtgatcttcccatcattgaggtctatttatagaaatagtaaattgaagccatcaggaatgatctccatatagtctgcccaaaattataaatttagctgaggacacttttcacctggactttagctcttgctaatgtaactgatgattttctatctaccaaatagtcaaaaatcagctttcctcataaatgaccttccttaagtacatgatatgggccaggcactgtgtaattctaagctgtacttgagactgttaaccactccctaatccttgcaactctgccccactggattcaatgacactggcttattctagttttcctcctccatttctagagctgctcctatccctttacccaccctataaggtaggtaggtatttctcaaggctctcaccttgacactcctctctcttccttctatatattctctggactagctcatttaagctcaaagcttctatcactactatttctgctaaaaatttccaaatccatgtgcccaagccaaactttgttcctaagttctaaaccatttactttcaacagcctgatagtcatcactactcaaatttcccagagacacctcaacacgttcaaaactaagcccatctgttccttccataaatatttatcttcctgtattcttttatcctttcttcattcttttaacaaacaagtatgtgtccagaaactaatataggcactgacaatacaaaaacatgctaactgctcaaaaggaactcacagtccaggaagagagacagtaaaaataataatataatctaacacatacaaagattgggatatatacaatgctatagaagtataggaatgggccggacacagtggctcacacctgtaatcccagcactttgggaggccaaggtgggtggatcatttgaggttgggggttcgagaccagactggccaacatggcgaaaccccgtctctactaaaactacaaaaaaaattagccgggcgtggtggcaggtgcctgtagtcccagctacttgggaggctgaggcaggagaatcacttaagcccagggggcagaggttgcaggcggcagtgaagtgaaattgtaccactgcactccagcctaggcaacagagggagactctgtctcaccaaaaaaaaaaaaaaaaaaaaaaaaaagtagaagaatggagaaggggaattagggatattatcttggaggatttaacatctgacttgaatctttaaaaagtaggagctaaccaggaaaaaccaacatgagtcaaaacagagctctaaaaataaacaggtatctacaagctttcacaagcaatttaagaacataacatccaaagcagggagtggcatccctaaatttgatcacacaggacctaacaggccatattgaaaaacttatacttcttcctgagtataaccaggaatttcaaaagagttttaaacaggggaataacatggtaaggtttttgtataagatacacatttctagcggctgtgtgaaagggtgaagattagaggcagttaaaaggctagcataacagttcaggcaagaggagagccttataaaagttgtcagaatcaaaatggagtcacttatgccaaaccctaacaaaatggaccatagaggaggggctctcatgtacacacgcctatgataaaaactattacaaggactctctgaaaaccacaacctcacacaaagaatactcctgcaaggacatctatccagtaaccgttcaaccccagataccactcttgttattgatccttgtggccaaggataagtgtttcaaaacaacttatgtaaccttccttgttttgcctttaaaagcttccctttgccttaccttcaccagatatgccaatgatccatcacagcacaaacatcctgcattgtaatcccttgtcattcgttcccaaatagactatttttttttttttggagagcctatttctctgctgttattttaggttgacagtctgcccaaggagcagtggtggtaaggttagaaagaaacaggacaaataaataattaggaacctaagtgagtggacctccagaggccaaaatcaaggaaaagtgaggatttaagatgatgattctaagaagaaaagaaatccaatagaaaaacagtcaaagggccaagcacagtgattcacgcctgtaatcccagcactttgggaggccaaggcaggcagatcacctgaggtcaggaattcgagaccagcctggccaacatggtgaaaccctgtctctactaaaaacacaaacattaactgggtgtggtggcacatgcctgtaatcccagctactcgggaggctgaggcacaggaatcagttgaacccgggaggcggaggttgcagtgagctgaggtcacgccactgcactgcagcctgggagacagagtgagactctgtctcaaaaacaaaacagaaaaataggcaaaggctataatcagacaattcacagaaaaacaaaaggccattaaacaaatcttaaaagcacaatttcactagtaatcagtgcaatgcaaattaaaacaatgggataccatcctcatcttcaccactccctccaaaaaaagagtcatgaaaatttaaaatggataatattcaatgttagtgaaggtgtggagatacaaacatgtttatgggctaatggtggagcatagcttagaacaggggtccccaaccccccagactggtactggcctgtggcctgttaggaactgggtggcacagcaggaggtgagcagcaggcaagcaagcaaatctccatctgtatttacagctgctccccatcactcgcattaccacctcagctctgtctcctatcaagagaggcattagattctcatacgagtgcaaaccctattgtgaactgcacatgcgaggaatctacattgcacactccttaggagaatctaatgataaacgcaatgcgtttgaatcatcccgaaaccacccacccctccatccatgggaaaattgtcttccacgaaactgacccctggtgacaaaaaggttggggactgctgccttagaataccctttggggatgcaatttcacagtatatatcaacatttaaaacatacacccctttgttttttctttataatttttaaaattttttttcaggcagggtctccctgtgttgcccaggctggtttttaactcctgggctcaaatgatcctcctgccttggcctcccaaagtgtgagccaccatgcccagccaaaacatacatccctttgaacaagcaattctagttccaagaatgcaaccgttcacgtttatacacaaagctctttaaaagaatgctcactatagagctgatctaaacaagaatgtggagatgacccaatcatccatccttacagttaagtcaattctagggttaaatgaattctgatgatccatactacacaagagtacaatacaagctaaaatatatatgaaatgaaatagaatgatttccaaaactgttaggagaaaaagtaaaccacagaataatatgtacaatatattccaactgatgtttaagaaaataaaagcccatatttgtttgtaaatgtaaagaaaggccgggcgcggtggctcacgcctgtaatcccagcactttgggaggccgaggcgggcggatcacgaggtcaggagatcgagaccatcctggctaacacggtgacaccccgtctctactaaaaaaatacaaaaaattagccgggcgtggtagcaggcgcctgtagtcccagctactcgggaggctgaggcaggagaatggcgtgaacccgggaggcggagcttgcagtgagccgagatcgcgccactgcactccagcctgggcgacagagcgagactccgtctcaaaaaaaaaaaaaaaaaaaagaaaaaggtctgggagaacaaataaaacttcaatttggagggaagagaggaatgaaggaatggttgggacaaagggagatgcatttttcactctagctaagagtatagcttgattcccatcccctgccccccaccacatgaattacttttataattaaaaaaattgaaaatataatgtgtatgacaagtgtggcatgctgattaagcaatctgactagtaaaacagatccaatggcttttctaaagccacagcccaagctaataggtgttcaataaataaagacttctgctaaatattttttaattggctattctcacacatggcttaccactggccaaagggcctgtgctgcctgtgtcccttgcaggtagggcaagtccactttctgcattcatcttactcagaggcgtacccacagaatttttctttgcaatggaggcatagtaattgatgtttcacatccttatgccttcaatcttcttcaaaagctttttaaaacaacaatcaattcttaccattccaagtatagttgtaataaaagttaagtgattgaaaaacaatcaggagaaaaggtgagaaagaaatattctgactcataatttaactaaaacgtggcttttattgtttcttaacatactcttcaacattttctcaagaacataaactactttggaaatttttcctctttttttatataccaagtatttcctcataacaaattctttctgatgactgcttttaacattacttctgaaaccaaatctctccaactaactttcgagtgattttttggcccatcatctttttctccaatatcaaagggactaacacagtaaagtgaggggaagcttcacttctgaatgcaaataaaaaatagcaatgaatatttgcttccagtagagcactctttttatatctacagtcaagaaagaggctgctaatgaaattggaccagtgggttattgtaattgagacttttttatgacttgctgttctgggctgaattgtgtcacccccaaaatttgtatgttgaagcactaacccccagtacctcagaatgtgatggtatttggacacagggtcttcaaagaggtaattaagttaaaataaggttattagggtaggccctaatccaatatgactgacatccttataagaggaacaaattggacacgaataaacagaccacgtgaaaacacagggaaaaggcagccatctataagccaaggagaggcctcaaaagaaaccaaacctggccaggggcagtggttcatgcctgcaatcccagcactctgggaggccaaggctggcagattacctgagcccaggagttcaagaccagccaggacaacatggcgagaccccgtctctactaaaaacacaaaaattagcctggtgtagtggcacgcgcctgtaatcccagctactcaggaggctgaggcatgagaattgctttaacccgggaagccgagatcacaccactgcgctccagcctgggtgacagagcaaaactcagtctcaaaaaaaaagaaaaaggagttcaagaccagcctggccaatatggtgaaaccccacctcactaaaaatacaaaaaaagtatctgggcatgatggtgcacgcctgtagtcccagctacttgggaggctaaggcagaattgcttgaacctgggaggcagaggttgcagtgagccaaaatcgtgccactgtactccagcctgggtgacaggtgagactctgtctcaaaaaaaaaaaacaaaaaaaaaaaaacctgctgacaccttgatctcagacttctagcctccgcaactgtgagaaaatatatttctattatttaagctattgttacgaatttaattgtatcatctcaaaattcatatgctgaagcaccaacccccaacatatatgtatttggaaatagggcctttaaggaagtaataaaggttaagtgaggtcataagggtcggcctctaatccaataggactggtgtccctataagaagaggaagacacactagggatgtgcatggatagagaaaaggccatgtgaagacacagcaagaaagcaaccatctggaagccaagaagagagatctcaccagaaaccaatgggataccatcctcatcttcaccactcccccacaaaaaagattcccaacattttaaaagatgaataatattcaatgttagtgaaggtgtggagatacaaacatgtctatatgctaatggtggagcattgcacatatctgagggcactttgatcttggacttacagcctacagaactgagaaaataaatttctgttgtttaagccacccagtctgtggtactttgttatggcaaccctagcaaactaatacacttgccaatccagtaattttaaaagtatgtttgcttttccatgtcacagaagattaagcatttaagcattcccactaaaacaataaaaacatggcagctttttataacatctttcttaccttcttaaataatgtggcagatgccatttcagacccatttagtgtctttaagaggaacatcggccaggaggatgtattcatctggtaccctgttttataaaataaattaggtatcatgaaaaagcctccttgtgatactattaacaagttggtataaaaaataggtttcattcaccattcttctcgagagaatgactttcttatctaagaactttgaacatgggcaagaggagcagatgtaccctcctctcattgctagtgtccccactgtactgtctggcaacaatgctacagtggggatagaaactctccttttaagagaagtcactagctagaattcacaaacaaacatgtatataatacaaggggtgatctaagctggagcctaggagagcttccattccaccaccaacaatcacacaagcaagggcaaaggctgtaaaagacttctagcccccttttcctcagggccccaggcttctttcacttcagaaagacagttttctgtcaaactcagcacatatacacacacaacagtacatttcattgcatgcaattttacctcaaaagaaaaaaacctatagatattgactcgttaatgatatatatgctaaaatatttaggggacgtgcactgataccaacaactcactctgaaatgtactaaaaaataagaaggattgatgaataaatagaagggcagatagatagacagatatgtgataaagtaaatataataaaatgataatggtagaaactagaaactggacatgggggtactcactgtaaaattttttcaccttttctgtatgtttgaaattctccataaaatgtgttagaaaaaagacagctctcactttagcaatcttaatacatactaaaaatgatcttcttttagaatttgtatcagatgctatcaaaatagactcaacaggtgtcttttctagagatctcaccaactaatggcttcacagcatctggcatatgcagcagggagcagggttctgctagttttactgctttctgggggcaatctgtttcatgcaacacctgcttgcctcaatgccagaattagaaagaacttggtatgcgcccctgatgcatgcatacattaagacagggaggcacatgaatcattggcaatgggtgcaggttttgtcctattttccatcaataaaacaaaacatacaaaaaaggtaagatggaaagtcatcctctaataatcctgtaccaaaatccccttaatctgaccagagacacaattgttgaaaaaaaaaaaaaaaaaaaaacaggggtggggggagatttgttacatactcccttataataaatcaacattattattctccattctgtggagagtattgcataagaatcattctctggtccttaagcctctctctcaactcccatattatcctattccatcatgtgcccagattttcctaaatgtaacattttacttaattctgtaattgcttaaagtcaaacatagattaaaagaccaaaattggattaaggtacatataaaaactttaaaaagagataaaactaatctataaggttaggaagtatagatggtagtacctttaggaaaggagagattatggctggttatcagcaggagcaggtcttctggggggctgataatgttctattttctgatttggatgatggctttacagatgtgttcatttataagctatatacttatgacctgtacacctttcagtttgtgtgttaaaactttataaaatcttttaataataacctttaaagtttaaacaaataaatctttttaaaaggaaaactaaataagttgtattaaaatggaagttaaactattcaaaagtacctaaaaagcaaactggcaccaatggtgcatttttaaatatactgccaaaacagatactaatcagcacatatttctatacatttcatatttttaaataaaacaaagtctaagaattttattaaaaagaatgaccataaatctagttatgtatttgaaatgctgacaattacaacagcagcatctcctttaaacaaactgcaaaaacataccatattgcaacaagagaaataaaatccaaatagggaagcactaagcctaggattgcacttatctttcacatagaattctgtgtaatttgagaaatattataaacaacaaataaacgacaaaagacgtgagtgaaagaaggcaaaaggcaaaaaacaaacatgccccaaaccatcttcttggaataacatatctccaactagtttttaaaaatattttagccgggcacagtggctcacgcctgtaatcccagcactttgggaggccgaggtgggaagatcacctgaggtcaggagtttgagaccagcctggccaacatggtgagaccccgtctctactaaaaatacaaaaattagccaggcgtggtggcgggcacctgtaatcccaactgctcgggaggctgaggcaggagaatcgcttgaaaccaggaggcggaggttgcagtgagccgagatcacaccactgcactccagcctgggcaacaagagtgaaaaccatctcaaaaaaaaatattttttaaaccaaattagttataacgaacaaatagaacaaggacagcataaagatatattactaaagagtggctattgttaatatcttaaatttgtgaaaaattttcacttaaattagtgaaaaaggaatttttcactaataggaaaacaaaaaaatccattcttttattgtgctttgcaacaaggaattttcattttcagcactgtaaagaaccaaataaaagtaaatgcccaccattcactcaaagtatagaacagcaactaaataaactaaatcatttctttcctacagagtatcatggtatgcttacattttaaaaagaaaaatgttgccccaaattagttacaccctttttacctttcaaaaatgtggccaaaattaaagtacatattttgtaccttaaaatctttgctaaaatctccattttctccttttcaaagacctaaaggtactaattcctgtccctctcgctctgatttcttcccactgtaggtgaaatgaaattcttgagtttgaaactggaacctgaatgtggaatcatacccttcccctaggcttatccccataccaaaattgctgaatggctcagtggacaatattgagagagcatgtgccttgtatcaaacgctacaaagttcttccccagaaggagttctgaatctgcatatgtaatctagtagagctggttttgacatttcaagtttgaagacctagcatgagtcttgccctggagtggagaaaacttctacacacatatgccaaatatgtacttaagcaaaactccacaacagatggtgctgatttcctctctcatcatacattctccacagcaaccacctgaccatctatttgcaagaatgcccaagaaaataaattttaaaaggccacttaaagccatttctattgaatatcacattagaaagaatacgctatttttaaaactttcttcttacctagtggaggttgaagtaagtctccttccttttcacatgtcccaacaggttgtatgtctggggaatcgacaagcctccaaaaatcatttctgttgtcactaccatccagtcgtaaccgtaacctggccccagtaattccaataaccgtagcaatacatactgaagtggcattgcgagggtcacgggcttccaatttcataccaactttgaaatcattcacaggtggaatctgagactatatatataaataaaatttggttaaaatgcatcaactataagagaagacacatggacagctatgtcaccagaatacctgaggaacattttaaataacagtcacagtggatgatgagtgaggtcagagctgtaagagtcaaggaaaagatcttcaaaattctctccttggcttgacatgcagcataaaaacactacccgctgctgttctcactcatctgcccacttccaggcaacccaaatacagcctctaaaatataccgagtggctttctaaagtaagaatctgattagaccattccccttgaaattagccaaccagcagctcaccactgcctataatgaagtccaactcctcagcacagtttaaatgcccccacacctttaacctcatttccacattatcgcctctatccactttgtgctccagccaccccaagccatcccttaatactcagattctttcatgcccatgtgccttggctttggatgttctctctgcctggactatccttcctcccattccaaccatctcaaatagcatcgctcctgtgagcccttccagtatggagttatcacacttctcataattatttatttatatgtctgcctttcctgccagatgggcaatcataaagcttattatacctgacatagagtaagttcttaatgaatgcaaagagaccatctggctcttaagaggcactaccacaatcccactatctcctcacactaccagaatctaacaatcacacagacgtcctccaacaagttaatagtttacattaactaacagctacagaatcttggcatacctgacggaagcactctgaaggagcacttatagacccagtctctttcaaatactcctcccagtggaaatcatctggaaaaaacacatgtgcaaaatagtttcttaaagcatatacaatgtaacttttagtatatacaactttcaggattaaaatgggttttagttccatgcctcttaaaagaaaaaaaaaaaaaacttccaaaagagtagattcaaaaatcctgatctacatttcatgaccagcataaaaataaaaaataagacgatatcctgataataatggctcagaaataaattataacctagatactctcattgtaatgtggactacagcacagtgattctaaaaatgtggacgttagaaataactaaagaaattgttttagagtaatagcgaagtctacccatctgtctctaatataaatttattcaataaatatgttttcaccactttattccattaatgtgaaggcacttctttgttattcatggggagctaaaggtttagtgtgcagtcaaacagaattttacccttgcaatgctttatggaaagaaaaaaatgtggtaaccagagtagtttctcaatggactattagatctctattcagagtgtcaagaagatggtggcagaacaaagcaataaaccagtcatcagtacagtcactaatatggattattttaatgacctacattttctacagactcttgctgtccttcctcacttagttttcatgacatattataatgttagaagagaagatcagaaagcagagcacattgcctggcttgaacgtatcatttcactgtgccagccagactgtcaagacactgagaaaaagacttgacagtagtagtgaacaaactagtaattcacatgatgtttaattctcatcattcatgaggcttttctatactcttgctaaatttcctcactataaaaatattgggtttgacagttctctttcctggaagaatctacgtttaccagcttcttacatttccttcaaaagatattatacttagatgactccccccttgcagaaaacaaaaaacaaaaaaacctacagagtgctgataatgtttaacaaccagctttctggaaaatacaacaaaaaacctgactgacagcgtttgcagatttccgtgatgtaaatatgaccaccatggttgactgtaaggtgccaaggtaaaaccaccaaccatgaaattgggaaaagatgtacacaattggctctcccaagccggtgtgagccagctccagtgtaccaccattacatatgtgtgtatgcatttctatatgtatgtatacatattatatgtggtattaagcatgtcacatgtaacattttgcaccttgcttttggttaatagatctaagagaccgtttcatctaaaagaaaatactgggtttgattccacttccagatgatgtgaagcaagcactaccagcattgaaaatcatgcatcagagagagtgttaagaatgtgggctttagggccaggtgcggtggctctgtaatcccagcactttgggaggctgaggtgaacagatcacctgaggtcaggagttcaagaccaacctggccaacatggtgaaacaccatctctactaaaaacacaaaaattagccggatgtggtggtgggcacctgtaattcccaactacttgggaggctgaggcagcagaattgcttgaactcgggaggtggaagttgcagtgagccaagatcgcaccactgcactccagcctgggcaacagaacaagactccatctcaaaaaaaaaaaaaaaaaagaatgtgggctttagagtcagatctgcctacttccagtatggctctacctcttactagctatgtgaccctgagcaagtcattcactttcttagcctcagttccttcatttataaaacgggaaaagtaatgtacatggtactagatatgttgagagctaaataaagtagcatatatgtaagtcactcaataaatggcacgttataaaactagaagtcatagttgtgctcaaatttattaatacagaatagctttgtcaaaagtgaaaaccgaaatccacggcttcaaaattaaacagaccagatgtttcagtgattgccccctagcactacagattctaagtgaagctctactaccatatgatcttggagagcattaaaaaagaacaaaacgggcgaggcgcagtggctcactcctgtaatcccagcacttgggaggccgaggtgggcagatcacctgaggtcaggagttccagaccagcctggccaacatggcgaaaccccgtttctactaaaaaaaaaaaaattgctgggcatcgtggcgggtgcctcccagctacttgggaggctgaggcaggagaatcgcttgaacccggaaggtggaggcgaaggttgcagtgagccaagatcgcgccactgcactccagcctgggcaaccagggggagactccgtctcaacaacaacaacaaaaaaagaacaaaacaaaacatttagttgggatggatggatgtcattaagaagttgacaccctggaggaaaatagtgtaagtcagaaataacaagcaggaaatgaatacccaaagaactaacactcttccataaaccaatgacatttgtaaaatttttcagtaatattagaaaatacttaattcatctccataacacaaatttttaaaatattctattaccatttgtgtctgaatgggctacaatctgagctagcaaatcctttatactagtgctctacaatataattttctatcaaattactggttaatgaccatatgcagcatttgccatttggagcctcaggttcgttggtttttgtttgttttcttttcccctttttccataaggcaaaattcttaatcatcttgataaaactgttcatcttggctgcccacgtgttcataacataggggaaacacacaaagctccaggctttactaatttagacttgacacatctacgtcaataccaccattggaattcccaaccagaagccaaaatagtcagaaagtcttagttaagcctgaggtcccagtctgcctctgcatcatgtcttcattgacagactggggatgggggcagtattctatctcagaagagaggcctgggaactgatatgattttatatatatatctccttgtgatctgattgttattcacatgtgcccatggtctcttctttttttatttgtactctattctagtctacacattagctccaacatctttttgtactgaatataacccatatgagctcccctggtcttctctagagtaaatcagaatcatgtcttccaccagtgctatccttgggatcccttgctatgtgaagatgggcaaaatacctagagatagaagtttctcagctgaatgatcagcatccactaattcacagcatttatcacaactacaattaggcatctgttaatttctatcttgcccactaagctcaaagagggtaagaggctgggtgcagtggctcacacctgtaataccagcactttgggaggctgaggcgggcagatcgcttgagcccaggagttcaataccagcctgggaaacacagagagaccccgtctctacaaaaaattgttaaaaattgccaggcatggtagtgcacgcctgtggtcccacatactcgggaggctgaagtgagaggatcacttgagaccagaaggtcaaagctgcaatgagccatgatcatgccactgcactctggcctgcatgacagagtaaaaccttgtctcaatcagtcagtcaataaaagagggcaggaatcatgtctatattgttcgtaactggattcccatagcaggtcatcagcatgtgccaggcactgtcctaggtactgcagatgcatgagttaataaaacagattaaaaccctggctctcttggagcttaccttctggtagtcactcactgatttctaaaataggatgttagggcccaggcctgagaagtatctgcagatggctatcaacttaagtaatctatttttttaattaaatgtctagaatgggaaaatctatagaggcagaaagtagacctgtgtttgcctagagctgggggagacaggaggcactagggagaaatggggagtactgttaatgggtacaggatttctttttagggggataaaaatgttctaaaattgactgtggtggtggttgcacaactctgtgaacatactgaaaaccattgaattgtgcactctaaataggtgaattatatgatatttgaattataactcagtaaagctgttatatttttaaaaacagatggagaggagtttgtagggataaggaacagtctaattcaatggcctccatttcctcagaggatttgggggtcccagggaagagttgaagaacaaataaggccatggtaaagaaagttaagggagcactgagggcccagctacagtgagagaacaacaattccgtggggattacctctataggcaatcttcaagtaggaacagaaggtcatagggtgaactgctctgcactggggctggcagggcagatacaacagaaacacaaggggcaagaaatctctggaaatgtctggtaaaacaatagtttgctacgttattttttaatgccttttgtgtacatatgacttattttctcatttaagagcaagccaatgcatcagattctattacatctcctgagtgtctctgatgcaatattatacatgtactgttcataataaggaacatgaattaataaagttaacatttactgaacacttactatatgcctaggcattatattaggtgctttaaattcatttcctctatttatttccagtagtgccatgagataagtactatcattatccctgtgttataaagaagaaaaaagagccgggcacagtggctcacgcctgtaatcccagcattttgggaggttgaggcaagtggatcacctgaagtcagaggtttgagaccagcctagccagcacagtgaaaccccatgtctactaaaaatacaaaaactagccaggcgtggtggtgcatgcctgtagtcccagctactcgggaggctgaggcacaaaaatcgcttgaacccggaaggtggaggttgcagtgagccaagatcacaccactgcactccagcctgggtgacacagcgagactctgtctcaaagaaagaagaagaaaaaacgtctaagagctgttgagtaatgtgcccaaggtcaccatggccagtaaggagtgaggacagaattccagaacacatctgtcggactcaccacaatgcctataagctcttaaccactgaactgtcttctgaccatgaaaaaaaagctttcacattgactgtaacgttagaagggtttttgctaataaccaaattattttaaattggtaatacatggcaattaataactagatacctataatttaggaaaatttgcactgaaatatacaaagttacccttttacttaatccgtgtcaacttatctctaagtaaaattttcaaaataaaatacaatttttgacctttcttattacattttgtatttacagaagtttacagtatacagactgtacaataagaaatcaaaacaataagaaaatttgcacttaaagttaattttaacactagtgaggaagaaaactatgctgtattaaattactttaaaacctacccctttgtacagaagatgtacttgactgaggagttttctcttgattctccttcttgacatccatggaatctaataaaaaagaaaatagcaatactgggagtccacagcaacagcttgaaagagcactcagaaaaatataaattaaaaaactttaaagagccaattttagttttataatatcttcattttctatgtaggacttaccattttctaatgtactatgcattttataatctgctcatttattgtctcactctactcaaatgaaatctccaaaagggcagagatttatttattttattgtctatctcattcactgtggtatcctcaagcgcctaaaacaggacctggcatcgcaacactctcaagcatttgttaaatcaatgcatcaggccaggcgtggtggctcacgcctgtaattccagcacttgaggaggccaaggcaggcagatcacatgaggtcacgagtttgagaccagccaggccaacatgcgaaaccctgtctctcctaaaaatagaaaaaattagccaggcatggtggcgggcacctgtaatcccagctactcgggcagctgagacaagagaatcacttgaacccgggaggcagaggttgcagtgagctgagatcgtgccattgcactccagcctgggtgacagagcgagactccgtctcaaaaaaaaaaaaaaaaaaaaaaaaaaaaaaatcagtgcatcaataaatcaaaatgagctgatctttacaatgtttaaattaacatgtcctagaaataaaacagatgcttttgagagttcaaaacataacagagaagctacaatacactgtaattcaatggactgggcagagattttcttggtgctaagctaaagagctcaaataacactggacctggtaacctcaccaaatctaagatgtatcatttcatccacatgtattatagtatgtatctctaaaaggactcatttttaaaaacttaagcataatatttctattacatctaaaaaaattaaccataattccttaaaatcatcaaataaccagtgttccccaattgtcttaactatttttagtgtgtatgcttgattcagaacccaaataagtccacacacatagcaatggttgatatgtctcttacatctcttttgatctacaggtgtcttcctcctttcttctcgtttttattcttcccctttacaatttttttgctgacaataccagttggttggtcctttcaagttttccagtctggattttgctgactacctccccacagagttcggttcctctgtttcttgtattttctttaaattggcattcatatttcaatccagaagagtttggtcagatttaagattggctttttggtgggagaggagaggataagatgacttcataggtggtgttgtgtatttctcacaggaggctcctaatatctagttatctctcttttcgtgatgtgaacagtcgtggatggctattgcctagatcctttcgtttattaatggttgcaaaatgaaggtattctaattctatcattctttattagccagaaaacttctatagagagaagcttccatgcttcaaccattcagttaccttaaggcacggatcacatagagaaatcacaatcagcactttattattttcctgtatttctagttttcaaagtgatgagctggatctctagcattctccacagatgaccagtaagttttatttgttttgctttttattatcattatgaactcatggatttaaacatacttgtgttgctattttacccttaccgatgttctaattgtcaagtgacaaacttcttaaagaaggatctaagaatgatgccattcaacgtaacagatctacttactagttatgactgagtgactcttcaagatgtgtgaacacttgagagggatatatgagctgctttctgtttaaatgatttcaactgagtggttgaagaaaggtagtttctctatatagaaattttttggccaataaagaatgatagaataccttcattttacaactactaataaatgaatggatccagggaatagccatccatgactttttgtgatttttcacatcacaaaaagagataactaggttggatgtgacagctcacacctgtaatcccaccactttgggaggccaaggagggaggatcacttgaggccaggagtttgaggccaacctgagcaacacagcaagacccagtctccacaaaaatttttttaaaaaattagccaggtgtggtggcacacatctgcagcctcacctgcttgggaggccaaggcaggaggatcacttgagcccaggagtttggggttacagtaagctatgattacgccactgcactctagtctgagtaatttcatctctgtaaaaaaatattttttaaaaaaaggccaggcacgttggttcatgcctgtaatcccagcactttgagaggccgaggcgggaagatcacttgaggtcaggagttcgaaagcagcctggccaacatggcaaaaccctgtctctactaaaaatacaaaaaattagccaggtgtggtagctcacgtctgtggccccagcctctcaggaggctaaggcaagaggatcacttaagcccaggaggcagagattgcaatgagccatgatcgtgccactgccctccagcctggacaacagagcaaaaccctgtctcaaaaaaaaataaaaataaaaatttaaaaaaagacagagagagataactagatattaggagtctcctgtgagaaatacacaacaccacttatgaagtcatcttatcctctcctctctcaccaaaaagccaaacttgaatctgtacaaagaacgtacaaatttgtatttactaaatagttctacagaaggatttttctaaaagaaaacaaagtaaaactgtaaaggcatgcttagcttctagagaagctaagaatctagtcaagagactacactaaactgatacacttaaaattagagaacagcatttagtactcagcattcagccagaggaaaagtcatgagagatacagcgcttgaaggagaaacaggatgtaggaaggccaatatgtaaagaatgtattatgggaaggaagatacaacacaaagctgactgcaaatgagtgtggcatattcatggaatagtgagcagacttctcatagagcaaaacaggatgaaacattttttaatcactctttggattctaatcttggctttgtcacaaactgttgtatgaccttaacctctctaagtttcagttttctcatttatataactagcaaggaaagacaatgacctttaatagctattcagttctaaaattcaaattctaagcacctagcatctcctataaatttattttttaaaggctttatttcaaaagttcagtataccagaagatattcattccaaatgagtaactaaaaacattattgcctttaacaagtaaatcttaccttcattcactgtttgtcccatggtatccctatttggtgttgtttcctacaaggagaaaaaccaattaatgcctccttttagcatattagatttctgaaggataagaagtcagttataaggccagatcaatttaatctgtttcccttaaacaaaaatgataagatttgtatatgcctagttgcctgggaatggaggaagaaggaattgaggagtgactgctaaggggcatgaatatgggtatgaagtttcctttgtgggataatgaaagtgtcctagaattagatagtggtgatggttatacgccttgttgtgaaaatactaaaaatcattgaattgtataccttaaaagggtgagttttatggtatgcaaattttgactcaatttttaaaattaattgagtaaaaaagaacagttggtaggttagcaaagttaggattcaaactgaggcctattccaggaagcccacttctgctacatcatgttgccaagaggtacaagaattatgaccgtgttgggaaaacctgtaagaactgcaagagtcaagtctaacaagaattatttgttagaagccttgtgtattttgagctataattcattaattcaaacttttcctgcatgtcctcaatatgccagacattctgcagcaaagataaataacaggctgtccttggcctccaagaccccagtctagtcagaaataagcatatgaacaaaacacaatataagtgctataaaaaaatatgtacatggataaacctaatatggcaaaaggctatctatcccgccattactccatgtgcctgtaataagaacatgatgatgtgtataactgaaggtaatctggcacttaaagtaaacctatgaagaatacattcataggctgggtgcagtggctcatgcctgtaatcctagcactttgggaggccaaggcgggtggatttcttgagcccagcagttcaagatcagcctgggacactcagcatcagagacactgatcaattaaagactatagcccagtggctaaagaaacagacaagaaagtaaaatatatacggggtgttgaatccacacagatgataaagcactgtaatccaggtagtaagtgaaggtacttaccgactctcatcaaagagcaaaaacctgtgaattacattaaaatgagtcttatcaggctgggcacagtggctcatgcctgtaatcccagcactttgggaagccgaggtgggtggatcacttgagcccaggggttcgagaccagcctgggcaacatggtgaaactctatctctacaaaaaatttaaaaattagccaggtgtggtggtacatgcctgtagtctcagctattcaggaggctgaggtgggaaaatcacctgagcccgggaaatccaggctgcagtaagctgtgattgtgccactgtactccaccctgggagtcagagtgagaccctgcctcaaaaaaataaataaataaatagtcttattactatacaaatgaattcagtccaataaactgagggatgggtcacacacagaagatataaccaggttcccatgttctctcaaatatctaacccatagctgaatgcttaactcagctggtagcaattgcttccattggctgaataagttatttttgtaatcctggaaggagtgaaaatacgtatacagatgatcgaaaatacatacttgaagaaaacctaaataaatcaccatattcacaagctggaagactcaatattcttaagatgtcaattctccccaaattaatctgcagaaccaacaaactgatcatcaaaatcctcatagggtcttcagagaaatatgctgattctaaaatttatatttttgaaaatggagaagattagaatagctaaaacaatcttcaaaaagaacaaagatggagaatttacatcatcttatttcaagacatagtataaggcaacggtattcaaaactgtgtgacattggcataggatatacaaattagatcagtggaaacaggctaggcagtccggaaatagacccacaaatatttggtcaattgattttcaactcagggaacaaggtaatccaatgggaaaaagaaaaatatttttaaaagaatgatcccattggcgggcatggtggctcatgcctgcaatcccagcactttgggaggccgaggcagatcatgaagtcaagagatcgagaccatcctggccaacatggtgaaaccccgtctctactaaaaatacaaaaattagctgggcgtggtggcatgcacctgtagtcccagctacttgggaggctgaggcaggaggagcacttgaacccaggaggcggaggttgcaatgagccgagatcatgccactgcactccagcctggcgaaagagcgagactcggtctcaaaaaaaaaaaaaaaatggccaggcacggtagctcatgcctgtaatcccagcacttttggaggccgaggcggggggatcacgaggtcaggagtacaagaccatcctagctaaaacggtgaaaccccgtctctactaaaaaatacaaaaaatcagccgggcatggtggcgggcgcctgtagtcccagctactctggaggctgaggcaggagaatgatgtgaacccgggaggcggagtttgcagtgagccaagatcacgccactgcactccagcctgggcgacagagcgagactccgtctcgaaaaaaaataataaataaaataaaataagaaaagaatggtcctgttacttaaaagcagacttagattcgttgtaaatgtatatcgcaaattttagggcaaccgctaaaaaaaagtgggaaaaaaaagaataatatgcttacaaaggagaaaaaactgaatcatattaaatggtcaactaaaaccacaaagggcagaaaatgtagaaaacaaaaataagaataaaaaacaagggcaaacagaaaacagcaataaatacagtagttattaatccaactatatcaagaattactttaggctgggtgcctgtaatcccagcactttgggaggccaaggcgggtggatcacctgaggtcaggagtccgagaccagcctggccaacatggtgaaaccccagctctactaaaaatacaaaacttagccagatgtggtgatgtgtgcctgtagtcacagctacttgggaggctgagacagaagaatcacttgaacatgggaggtggaggttgcagtgagccaagaacgcgccactcactgcactccggcctgggcgacagagcaagactctgtctcaaaaaaaaaaaaaaaaaaaaaaaaaaaacaaccaattgtatgttggctacaaaaaaaaaaaaaaaaactttaaatataaagacacatataaactacaagtaaagggatggagaaagtccatgctaatactaatcaaaaaaaagcaggaatagaggaatagctatactaatttcggacagagcagacttgagagcaaggaaagttatcaaggataaagccgggcattacataatgataaaggggtcaatactcaaaaaagatatgacaatcctttatgtgtatatgcctaacaagagagcatcaaaatatgtgaggcagaaaccgatagaactaaaaaagaaatagataaatccactattatagtaggagacttcaacaagcctctatcagaaatggacagatctagcaggcagaaaatcggcgaggacatagttgaactcaacatcatcagttggatataattgacatctagagactacttcatccaacaagagcagaatacacattcctctcaagctcacatggaacattcactgagatagaccatattctgggccataaaacacaccttaacacacttaaaagaatagaaaccatacaatgtttcagttcttagaccacaatggaattaaactagaaatcaataacagaaagctgaaaaactcccaaatatttggagattaatcaacacactctgaaataatgcatgggtcaaagaagaaagctcaagataattttttttaattcaactaaatgaaaatgaaaatacaccttatcaaaatttgtccattgcaatgaaagcagtacttagaaggaaatttacaacattgaatgcatatattagaaaagatgaaagggccaggcacggtggctcacgcctgtaatcccagcactttgggaggccaaggcggtaggatcatttgaggccaggaactcgagaccagcctggccaacatggtgaaaccccatctctactaaaaattcaaaaattagccgggcatggtggcacatgcctgtagtcccaggtactcgggaggctgatgcaggagaattgctcgaacctgggaggcacaggcttaagtgagccaagattgcgccagtgcactccagcctgggcaacaaagggagactctgtcttaaaaaaaaaaaaaagaaaaaaaaaaaacaatccaggcacaaactgtatgatctcatttacatgtgcaatctaaaatagttgaactcacagaagtacagagcagaatgatgattaccagaggctggggaggaaggggcaaggaatggggagttggtcaaagtgtaaaaagtttaggttagacaggaggggctgggtgtggtggctcacatctataattccagcacttgggaaggccaaggcaggaggattgcttgagcccaggggttggagaccagcctgggcaacatggcaaaaccccgtctctacaaaaaaatacaaaaattagctgggtgtggtggcacatgcctgtagtcccagctacttgggaggctgaggtaggagaatcacctgagcctgggaagtcgaggctgcagtgagtcatgatcgtgccactgcactccagcccaggtgacagtgtgtggtgaccctgtctcattaaaaaaaaaaaaaaagaaagaaaagaaaatgaggcagtgtaggaacacccagcatagtatctcaaacaagtagaagctcaaagactgttccttatcccattccatctgtcctaatgaaaacttcctgaaattagtgagttttagcattaacatttaacattaatcatgttgtaaaatgaaactatgttccaacttggatttccaagcattacttggttactcttccaaagtacagaccaaagagttgttgcttaacaaaacaggaactctaaattaaattgctcttatattaagctgaaataaataaatgtatatatttataacaaccagacatatcactatcaaagaaagcagctgtcatctactaatcagcattatcagaaaagttatacattctagctaaagccaaaggaaacttgacatcatctcatgctgtatgacttttaggtaattattcattaatatattatttcctttaaggtaggtgagtattgaaaatagcttttgggccgggcaccatggtgcatgccataatcccagcactttaggaggtcaaagtaggaggatcacttgaggccagaaatttggcaccagcctggacaacacagcaagacaccatcactacagaaaaataaaataaaataattagccgggcgtggtacagcacacctacagtcccagctacctgggaggctgaggagggaggatcacttgagcccatgagttcaaggctgcagtgagttatgatcacaccaccacttcactccagcctaggcaacagagtgagaccccagctctaaaaataaaaattaaattaaaaagaagagaaggtggcttttggccctttatgagccaaaacatccttgtggactcctagaaaccagaattttctttttctttttacacattcatcatcattgaaaataaatgagaacacagataagcaaaaagaagggggaaagaatcacctataactccaccaccaaacaatacctgttgttaaccatctggtgtacacccttcaaattttaaaaaatcatatatgtaaacccatatacaacatatatttgaaccacttttaaatatataccaccaaattccatatatcgataatcttcaaatgaaattctctctatataataaattcataaagccaacatttcttagctaaaatgaaatgtacaatgaataataaatgccagttcataccaaaggctggacacagtggctcacacctgtaatcccagcactctgagaggcaaggtgggaggattgcttgaactcaggcgttccagaccagcctgggcggcacagtgaaacccatctctacaaaaaaatacaaaacttagcaagccatggtggcacacacctgcactcccagctactcaggaagttgggaggatcgcttgagcctgggaggcagaggttgcagtaagctgagatcacaccactgcactccagcttgcgcaacagagtgagaccctgtctcaaaaattaatacataaaatgtaaaaagttaattccttaaggaaaatctccgctattcttaagattgacgctcaggacagaagttactgcttattttgcaatctaacatgtgataaacaaggccggatgtggtggctcacgcctgtaatcccagcactttgggaggccacggcgggcagatcacttggggtcaggagttcaagaccagtctggccaacatggtgaaaccccatctctactagaaatacaaaaattagccagacgtgatggcaggcacctgtaatcccagctactcaggaggctgaggcaggagaattgcttgaacccaggagacagaggctgcagtgagccaagatcattccactgcactccagcctgggtgacagagcaagactccgtctcaaaaaaaaaaaaaaaaattaaataaataaataaaatgtgataaacaataaggcagatgaaaatctatttactagactcttagcataatttttaagttcataactatatttatcaaatactgctttttgataatgtttgatcaccaaaacttttcatcatttcctatataatttttgtatcttatactttgttgtttttaaaaaaggattagcagtcccaatataaaaatacacttagggtaaagttttatttgtttgttcgaattaataagagcaaatacctaggccttggggctgccagcaggagtgccatggtgagaggcactggcagggaatgcggaagggagcactggtccccagccccaggccaagagccttggtttgcccactaggattgttttaagaaaatggcagacaaaccagacataggggaaatcgccagcttcaataaggccaagctgaagaaaacagagatgcaggagaacaccctgctgaccaaagaggccattgagcaggagaagcgggtgaaatttcctaagagcctggaggattccctacccctgtcatcttcgagaccccagtagtaatgtggaggaagaatcaccacaagatggacacaagccacaaactgtgacgtgaacctgggcactccgtgctgatgccaccagcctgagggtccctatgggtccaatcagactgccaaattctctggtttgccctgggatattatagaaaattatttgcgtgaataatgaaaacacagctcatggcaaaaaataaaataaaataaaaatgtactagttagttgggaaaaatttagtaattccctctgggcttcctagtagataaaagcaaaaaggaaaacacttgggttatatacacacaaattcagaaaaaaaaaagacaaacatttccctaggactgaatactaggaagaatctgcgaagatcctgatgtaaaagaatattgactaatttaatagaaactatctttgactataacttgagaaaaaataaaacgttctattgtccctcttaaaatgcattacactgtaactcacctgtctttcagtcacaaggatggagattatagatgtaaagggaagagaagagtactataatctattggtaaatgctggatagcatcaacggattcttagttgaatcctcagagtgtctcaaatagaaaaatatggtggcaatagatgcagacagcacagctctttctgggaaaaattagaagcctgaagttcttttagaaacacatttccacagtggtagtctgcaaggaaaactgcaaaaaagcttatctttgctttcaatatactttgaacctgcttcagcattataagaaaggctcaaaaaagaccctcaagtaacttgccttgatacatgggagaaaaatttttggttttaaaaaaagttaaaagcttcaggcttttgtttttgtttttggcaacataaagagtagaagttgcttcacttaatgcatattaggagcaattccactgtgtgaaaaaacattcaaatgtaagtaagccttaaaaaaaaaaaaaaggttaggttaatagtatttcatagcgcctgacattgaaatttcacttaccaaaagactacagttgggccgggcgcagtggctcacgcctgtaatcccagcactttgggagaccaaggcgggcagatcacctgaggtcaggagttcaaggccagcctggccaacatggtgaaaccccatctctaccaaaaatacaaaacttagccaggcatggtggtgagtgcctgtaagctcagctactcaggaggctgaggcagtagaattgcttgaacccaggaggtggaggttgtagtgagccgagatcatgccactgaactccagcctgggcaacagagcaagactccatctcaaaaaaaaaaaaaaagactacagttatactaaatctagcagttgcatctagaagctctgaacaagtatggacaatctgcaatcttttacacaaccatttgttttgcagattgtatcttgttacagaattaagagctgataaaagatcaacaaatgctttgaaaagtcttgttttaaaccattttctcaacacaattaaacaatgtaaacagtgattaatagtggaattattaagcctaaaactcccattactcttatctgattctggagaaaattctacaatctgttgagaaaaacagttttaaagtactatttaacaaactaatgggtctataattctaagattatagggcctttccattatttgtttattttctggggttttttgtttggagagtttttttctttttcttttctcttttttattttttatttttttcctttcgtgtgccccacctcccttttttttttattttgttttgtttttaagataaggtaagctacaccttgagtctctaaagatcactacctgaagagtagtgatcttcagtaagggtaaacattttgacaaggacaggaactgaataaatctgacagcaagaaatatcccaggttccaggttcagttcaatttcactagggaaaaaaaaaagagagagagagagagatttcccaaggcctgtttcaactttaggccattggtcagatgttataaaatgaatacaactgtagaatttcaacctgagagaacataagaatcaataaaatacggacaggtgcagtggttcacgcctgtaacacagcattttgggaggccaacgcaggtggatcacgaggtcaggagatcaagaccatcctggccaacatggcaaaaccccgtctctactaaaaaatacaaaaattagccaggtgtggtggcgggcgcctgtaatcccagctactcaggaggttgaggcagggagaactgcttgtacccgggaggcggaggttgcagtgagcagagatggcgccactgcagtccagcctgggcgacagagcgagactctgtctcaaaaaaaaaaaaaaaaaaagaaaaagaaaaggaaaaaaaaacctgggccggattacaatcacacctgtaatcccagcactatgggaggctgaggcaagaggactgcttgagctcaggagttcgagaccagcctgaacaacacagtgaaaccctgcctctatttaaaaaaaaaaaaaaaaaaagaaagaaagaaaagaaaagaaaagaaaaaataataaaataaaactacgaaaccaaactctcattccctatgacttgtgggaaacttaaaaaataaaaatttttttaaaagaccaggtgcagtggctcatgcccgtaatgccggcactttgggaggccaaggcaggaggatcgcttgagcccagaagttcaagaccagcccgggcaacatagtgagaccctgtctctaaaaaaaaaataataaaataataaatacataaataaccaaattcttgccatccaaaatgagctcctcttcctctgcattttattttaaaagcattacaaaccctcaatctttctgaattagaagtcatctttgactcccctcctcttctgtcttatcagttaccaagttattttgattcctcaagatcaggaagctggtagtgaaagaaaaatgattcaaatcgaggtttgtcaaatgccaaaagacaaggctccaatacaccgtatgtgctttgaaagggagaaataaggagtgatatggtttggtgtccctacccaaatctcatcttcaattgtagctctcataattccctcatgttgtgggagggaaccggtgggagataaatgaatcatgagggtggtttctcccacactgttctcatggtagtgaataagtctcaggagatctgatggttttataaagagaaacgcctttcacctggctctcattctctcatctgctgccctgtaagacatgcctttcaccatgattgtgaggcctccctagctaggtagaactgtaagtccattaaacctctttttcttataaattgcccagtttcaggtatgtctttatcggcagcgtgaaaacagactaatacaaggagatattataatataccagataccctagacaaaacggatccatgagggcaggagaaaacaaaagttatgttcccagagattcaatgataatggtgttggcagtggtgatactactactcagatctgttacttactgagctcttgctattaatgaatgcctggtaccctaccctaaggcttttatatatgtattttttcttatctaaagcttattacaagcctgcatagtagatactgttattaatgtccattaatgttcatttgaaagttaaggatattgaggctcaaagacctgcccaagatcacccagctaggtttgaatctaggttcatgaatgcttaaccattgtgctaaaactgcctttgttgtgtttaactgtgtaagtgccttttctcccgtgctagacaataagctcctgggggcagtatcacatctcgttcttctttatatccttcagaataacgagcacagtgtctatcacatactagggtccccaaaatgtttgctgaatgagtaaactctgctgtgctataggctgcttgtatctaaactatatagaaccagaatactgtggtttttaaaaacaattttttttttgaaacagggtctctctgtcacccaggctggagtgcagtggagtgatcatagctcgctacaacctcaacctccccgggctcaggtgatcctcccacctcaccctccctagtagctgggactacaggcacacaccaccatacctggctaatttttgtattttttgtagtgacagagtttttccatgttgcccaggctggtctcaaactcctgggctcaatgaatcctcttgcctcagcctctcaaagtgctggaattagaggtgtaagccaccacacatggactaaaacaattttttgataaaatttttcttttattctttgttttgagacagggtctcactctgttgcccaggctggagttcagtggcataatcagggctcactgcagcctgacctcccggccttaagtgattgtcctgcctcagcacaccccctgcacaccccctacccccgacacacacacacacaaagtagctgggactataggcatgtgccaacaagctcagcaactaattttttttttttttttaattttagtagagacgatggctcactaagttgcccatactggtctcaaactcctgagctcaaatgatcctcctgcctcagcctcccaaagtgccgggattacaggctcacgtaagccacggcgctcggccgagatttttcttttggccatcattgttgttctctgttctttcctgcaatatcaaatcagctgtcttaatttacacacaagtctaagtcaatgggccaaggagaaaattctgtgagatctgagacaatcccccacctccaatatctctctctttcccagaagttgattggccttttttttttactctgaattttatctctttctaggatgttcatggtctcaaaaagtcaggctccgtatgagttaccattatagaattcagtttataaatgccaactacataacaggtataactaaaacatgtgctttaaaccaatattcaccaaaaaaagaaacaacaagccaagtccctattcacaaaataatctattgaaaaaaatgtttcatcatagccccttgagtttatcaacagcataagaagtttcaaggataagagagattcacaaatacgtttgctggtgttttaaagaaaatgttggaataagtgacggaagttattatacatacacaatttaccagagattaattaaatagcacaggtagaaagggttcttttccttttaaaatctatcttgttataaagacactacttttagacttgaacaaacaaaaacgctgtcctttattgtgaaggggaaggtctgagttaactgcataaaataacacctttatgtttttaacttgtaaatagtttattattttgtttcaagaagtacttcacatttatgcctaaatgcaaaaaaaaatactgatttaattaaaatacactgtagttatgtattttttctttgaccaagagaagctctctctttcaactaagattttgtttctggtaatagtgattatcctaatacaggatagaaaaagtgtatattccattgtataaccatacataattttgtggaattgaacatgagtcatcacattaagattccacaagtatctattcaattcactcaagtaaataatcaaatgtcacattttctgacatagttataaaagtaatcagaaaaacactaaattctaatactgtaattacatttaaaactaaaattctatctctgaattaagactaatcaatattaagaaagaacaagccgggtgcggtggctcaagcttgtaatcccagcactttgggaggctgaggcgggtgaatcacctgaggtcaagagtttgagaccagactggccaacatggtaaaaccccgtctctaccaaaaatacaaaaattagccgggtgtggtggcgggcacctgtagtcccagctacctggcaggctgagacaggagaatcgcttgaatctgggagggggaggttgcagtgagccaagatagtgccattgcaccccagcctgagtgacaagagtaaaattccatttcaaaaaaaaaaaaagaacatttttaggccgggcgcaggggctcatgcctgtaatccccgcactctgggaatacgaggtgggcagatcacttgaggtctgaagttcgagaccagcctggccaacatggcaaaaccccgtctgcggtggtacacacctataatctcacctacccgggtggctgaggcatgaaaattgcttgaacctgggaggcagaggctgcagtgaaccgagatcatgccactgcactccagcctgggtgacagagcaagactccgtctcaaaaaaaaaaaaaaaaaaaaaaaaaaaaagaacattttcatctccatatttctgaaatctgtaaaaaaaaatcaaagaacatttttggtagcaataatttatcaaatcaagccttcttgaggaaattaaggtttctaaaggagcaattttaaattatgctttagtaaagagtccaccccaacaaattagtaattaatctttttctgtgtcaaaacaaacctaagaaggcttaactattttcaaaaatttctaatttaagttaccccccaaaaaacctgtaagttaatcacttgcaatttcaaaatgatttatgtgaaagctatgtatttagtgaagaagtatgtcatgtcagaaaacagataaacgaaagataagtcaagggttgccaaaatcccagtttatagttgtaaattcctgaggttttaaagcacagctacaggctaactgcccaaagacctgctacccactgacttttgtgaaggacttgagttaatggcagggcatgtcaatatactacaggcagctaatggtgcaactttttgacaaaagaactggatctggttacaggctgttcctattatcactgcagtctagatttatggtttctaacaccggccctacaagaaataatggaaatgatgacaacaacaatccccactagacaacagactgcagaaaagcatgcaataaaccacaatctgaagaaaccagaaaactaaacatccttgaaaatacctcaaacatgaggcaggtgtcagcaaattacccattcaaatatttctacaacttctcaaatttcaacacaaaaaaaatctcaaatcagagtctctaaagtaatctaaaaccaaacaatatctaaatatacttactattgcctactatatattaattcttttaatgaccaaagatgccgtgtttcatttgaacagatttatgaaactctatcaagttagttaaaaattaatactgactatattgcttttcaaataacattaaagagaaaaatactccaaataacattttaaaaaatatttccaaagaaaaaaaagcaacagttcatagcaaagggcacatgtttccaaatgtattcaaagaggaagagaactgaaaagaagaaacacatttgattcagcatttaaaaataaatatataatcaaaccttaaaccagctaaaactgatgaaaggtaggaaaagtggccaaatgttaaccaaaaaaaacaagcactttgtcaatacacttaaaaaactatgtcaaggctataaggtacataccaaacaaatggagctgtttgtctataattcgccaccagttaatctttatgagaaacagaggttgcgaaaaatcaaatgtgtattctaaacacaaccaaagagagccccgcaaacttttctctgagaaatgaaagcatcttcaaggtatgccctagaattgtaatatatctgtcccttctgaagtttacaacagtacgttaccactaaaagtgggcactctctttcccctcttaaaacaatttgctcctataaacttaggaagaggcagagccatagccataaacacaggtcacaagtagtaggtaatcaaatgctatcttcagtttcccaggtctttactcacagcttattctataagttttaactcttcaaataaggaattcatgtagtctaggtcaaatgatcatgatattaagatgaacagcaccatcatattcactgctacaggatcctcaaatatttcacttttcacacaataagatatctccattgcttatgttaacacctctccaggctgggcgtggtggctcacgcctgtaatcccagcactttgggaggccaaggcaggtggatcacttgaggttagaagtttgagaccagcctgaacaacatggtgaaaccccgtccctactaaaattattttttaaaaaattagctgggcatggttgcgcacgcctgtaatcccagctccccaggaggctgaggcaagagaatcacttgaacctcggaggtgggggttgcagtgagccaggattgtgccactgcactacagcctgggcaacagagcgagactccgtctcaaaaaaaaacaaacaaaaaaaaacccagtattatttctaaggttgccaaggtaaccctagaaatagacaacataatgacaaaataaacaaaatcgcctttctcatgaaaaccaaagaacacatacacatttcaaatcttgatagcttctaaaattttttcaagttatttttaagaaccaccattggcagggcgaggtggctcacgcctgtaatcccagaacttcaggaagccaaggcaggaggatcacttgaggccaggaattcgagaacagcctggccaacatggtgaaaccccatctctactaaaaatacaaaaattatgaaaaatacaaaaattagtgggcatggtgatgcacgcctgtaatcccagctactcaggggctgaggcacaagaattgcttgaacccaggaggcagaggctgtagtgagccaagatcacaccaccgcactccagcctgggcaacagacagagcaagactctcaaaaaaaacaaaggccagattcggtggctcatgcctgtaatcccagcacttggagaggcagcagaagtggatggattacctgaggtcaggagtttgagaccagcctggccaacatggtaaaaccccatctctactaaaaatacaaaaattagccaggctcggtggcgcacgcctgtagtcccagctacttgggaggctgaggcaggagaatcacttgaacctgggaggcagaggttgcagtgagctgagatcgtgccactctactccagcctgggtgacaaaacgagactccatctcggaaaaaaaaaaaaaaaaaattagctgggtgtggcggtacatgcctgtagtcccagcaactgggaaggctgaggcaggagaattgcttgaagccaggaggcagaggttgcaatgagccgagattgcacctgcactccagcctgggtaacagagcaagactccgtatcaaaaaaagaactaccacaaactctttttataaatggtaaccaaagcctaaggtacttagagtctaaaaaatgtacttaccactaaattataccagtatttatataatggtataaattatgccattttaatctaagataaacgccagtggtttcttttatctatttccccaagacaaagagatcctgaatattaagccccaaagccagggaagggtataaactcttccttcaaaattaccaacacggccgggcgtggtggctcacacctgtaatcccagcactttgggaggccaaggcaggaggatcacctgaggtcaggagttttgagaccagcctggccaactaggtgaaaccccgtctctactaaaaatgcaaaaattagctgggcatggtggcacacccctgtaatcctaactactcaggaggctgaggtgggaaaattgcttgaacgcaggaagcagaagctgcagtgggctgagatcacgccactgcactacagcctgggcaacacagcgagagcccatctcaaaaaaaaaaaaacatcaccaacatttgccattttcaaaatgtccaggtttttagttcctggaatcaacaatcagttcaaattctaaggtattatgtagtaattctcagacattaataatggttctaaaattattagggatgcttgatttgcccactgcaaactacaaaacaccttctggcaatgacagactaatctttgcaccacagctcatagctctaaggctgatagctggcagagcccactttgttcttgtatatcctaaaaatcaggaatatgactatgaggagacagtgagacctaccctccccaccccgagagggtagctaatagagaggacctccgatttccattcacaagtggaatgagaatagagggagaaaaatggcagacagaataaccaggcaaaaaaaaaaaaaagactagaggtgactaataaggcaaacagcagaggatactgctgtatccacccgtgttccagttactagagttacaaaagtcattgctattaaccccaaaagaaaggcagtaaaatagtcaagtgaaacttttctctcgcacccccaagagctcaaactaaaattgggatttggctcttccttaaatggaacaagtggctacatcaagttaattcaaaagacttggtatttactcagccttttcaaggcactttaccatcattaattatttctcagtgaagcagcaaaggattaccctgaccatttcactgatgcggaaacagacaccaacagcaaagggaacaggggcaggaagaggggtgataggaagcatctgggaggaacaggcaggcagctaaaaaggaacaagcccaaaagaaaataagagtcacatctggcttatagctgaggatcataacccttatttgttatttctgagctcagagatttctgcaacattttgaaaaaacaaagtgctttaaaataccagttaaaacttaattacagcttaaactacttagtaatagaaattgcttagtattaaaaaatacccaatcttcagagcacatattgatttccatttataccagcaactcatttttcccctcaagcttaaccagtatgttatctatttgaaccagaaaataatctcatgaaaatatatagctttatataatcctaaccaaaaaatcacaaagttaacatcacgtaagtcagaaatagtttgcagctacactcagaattttgtttggagaattatgacaaaaatactgacttctcgagttcgccctttgaatgaaaggaatacttgttctacattcgtattgatttttttagctataactccctgaaattttcaggaataaactatgggtggaaagccttaaacaccctgaaattagcacacgtagtgggctctgaataaactgaactccatagtaaagacagcacaggtgcttaataaagatgtgttgatggaatcataaatcaaaaggactgatcaaccacctcatgagaaaaactgatacaccttttttagactgactgtaatgatttttgaacgttatgacactatcaactttaaagcacccgcacatataatgcagtagagttacagtaatcttttttccaactaccaattccaaagcaaatcaggttctctggggtaaacaagtatacatccttaagaagttcatatggctgcatgatgtatatataaagttcattcaaaactttcaaagccagtttaaatggtgttttttctttacattctatcaaactgttttaaaggttatagataaagctaaacacaaggcatcaggtgaatactcataaactcaatcttttctcaaaaatcccactggattcatttccaaaagcttattttcacattcctcccattaaatagaaaaaaaaaaaaaaaacacacaaacagcctgaaagcacattcgtaattggaaatattttatttaatgagtaattaagaaaaataaaagaaaggcaaaatcgtcattattgaaaaacatttccctcgctgttattgaaaagaattaaatatgcgtttatgaaccattgttataaaacaattgctcatcataggcagctgtactccataaatgttgtacatcttaaaatacttttccctcaaaacagaaatatgaatagctctgggggcattaaaatgtagcagcatctgaagctgttttagggaaaaaaacaactatctccaatacttttgtaaatcatatgatcataagcaacttattcactttccctgcctcagtttacccccactaatcgatccattaactttccagagaagacctaaagtaagtcataaacgttaatctcctaatttacaaacaagaagcaaatttcaagttgcaatcacactttgtgatgcttgacaaatgtttaacaacctctttttaaaaaataaatagtctcaaatgggagcctgtaagtaaatacttgtgctgcccaaacatttggggtttgggggagccgaattacaagtcggcccaggaagctatctatgtacaaccttgaggcgcaaaatcgagcaaattcgcctagacccattctccctccggctcttcacacctggatggggcgcaagcacgatacaggtggaaaaagcgagaaaggtaagaaaccatttcgagactgtttctaagtgacggcagcaactttttttcggtcaggccgcgaggccgcctctccgcccctcaggaggcttagagcccctcctcgcctccccgccagccccggacgggacgcgcattccggtcccgctgcaccgctagggtgagccaccggcgcccccagcccccgccaggagcccggcggcgcgcaccttggcaccaggatttgcgcccgcacgccgccacaggcgcatccttccgggccgacgtttccctcccaaactccaaaagttatctcagcccagaccaggcaaagtctacctccttcctccgccccgccacccaccgtgatgccccccaggccccagcccggccctacccacggcagggaggatgcgccggagggcgctgtcggcgctgcaggcgaggggacgggtggaagctatcggccgggcgcccaaaccccgcggcggcgaaaaggccccggggcggcgtgaggggaaacgcgagatcggctgaagggcgtccgcggaaggcgccgggggcgggataccctatcgcgaagccgaactgagatgggacataggcgggatcgtaagggggcgttcctcgcacgggacgcgcgctgatggcttctacccgcccgcccacggacaacggtcggggtccgggacacacctccgcctctccattccttacggggcccggaatcaccacgtacctccagtctcgtcggtgaaaacaacgaaattctgtcccaccgatcgcgcgagccggcaccgagcttcacaccgccgccgccatgtttgagaagccgcgcgcggagccgcgcatgccccgcaaccgccactgccgcc

SEQ ID NO: 2 - protein, 700 aa, Homo sapiens
MGQTVNEDSMDVKKENQEKTPQSSTSSVQRDDFHWEEYLKETGSISAPSECFRQSQIPPVNDFKVGMKLEARDPRNATSVCIATVIGITGARLRLRLDGSDNRNDFWRLVDSPDIQPVGTCEKEGDLLQPPLGYQMNTSSWPMFLLKTLNGSEMASATLFKKEPPKPPLNNFKVGMKLEAIDKKNPYLICPATIGDVKGDEVHITFDGWSGAFDYWCKYDSRDIFPAGWCRLTGDVLQPPGTSVPIVKNIAKTESSPSEASQHSMQSPQKTTLILPTQQVRRSSRIKPPGPTAVPKRSSSVKNITPRKKGPNSGKKEKPLPVICSTSAASLKSLTRDRGMLYKDVASGPCKIVMSTVCVYVNKHGNFGPHLDPKRIQQLPDHFGPGPVNVVLRRIVQACVDCALETKTVFGYLKPDNRGGEVITASFDGETHSIQLPPVNSASFALRFLENFCHSLQCDNLLSSQPFSSSRGHTHSSAEHDKNQSAKEDVTERQSTKRSPQQTVPYVVPLSPKLPKTKEYASEGEPLFAGGSAIPKEENLSEDSKSSSLNSGNYLNPACRNPMYIHTSVSQDFSRSVPGTTSSPLVGDISPKSSPHEVKFQMQRKSEAPSYIAVPDPSVLKQGFSKDPSTWSVDEVIQFMKHTDPQISGPLADLFRQHEIDGKALFLLKSDVMMKYMGLKLGPALKLCYYIEKLKEGKYS

SEQ ID NO: 3 - DNA, 10675 bp, Homo sapiens
tccgagctgcggggagtcccagcctgggatctttgcctcatgtccttgggctcctgccctggctggcccgtcccccaccgccatgaggtgtcagattgtgtttccggctgcctcttcccgttgaccccctcctcccccaacacctgtcccctctcccgcccaccctcattccacagccctgtagacaggaggggcagatgcacgtcccagtcagagggatgggatggaggggccagtgctgacactggggctgctggctgccctggcggtgtgtggtaagggaagacaccctccccaccctggggtcccccgtgatgcttacccaggccccacaccgcatggctcctcactcactccactcccactctgccatctctccctgtggggggccgccttctggggtccccactcccagggagtggttgggttcccccctgctcatcccaacctcatggtccagcaggacctcagggcagcttccttcctgagtcccctgcccagggccccattcagtccttgtcgctgaccctccccaggcagctgggggctgaacgaggaggagcggctgatccggcacctgtttcaagagaagggctacaacaaggagctccggcccgtggcacacaaagaggagagtgtggacgttgccctggccctcacactctccaacctcatctccctggtgagaggccctccggtgctgggttgggagggagggcagggatggctttccagtaccaggatagccatggaggaagctagaagcccccacctggcctatggccactcccttcctgggaaacgtgctgcggctgctctgtgccctgagaggctgctgtcctgcccctccagtgtcagctctgcggtgtcccccaaccacacccatagcatgccccatctgtgacacacttcagaggccactggtcctctctgctccctggcggcctacccactcctgactgcgagtgatcagggcccagatgccacggtttccctgggtgccaattgacagtgggtgaatgtaggctgggtgtggtggctcatgcctgtaatcccagcactttgggaggcccaggtgggtggatcacctgaggtcaggagctcgagaccagcctggccaacatagtaaaacctgatctctactaaaaatacaaaaattagccgggtgtgatggtgtgggcctataatcccagctactaggaaggctgaggcaggagaatcgcttgaacccaggaggcagaggttgcaggttgcagtgagccaagctcgtgccactgcactccatcctgggcaattgagcaagaccctggaaaaaaaaagagagagagagagagagagagagtgggtgaatgtgtgcggataaaagaatgatatggccctgaaggatggccctaccgtctaattacagaaagaagttgaggagaccctcactaccaatgtgtggatagagcacgtaagaatgcccctcccagccgggcgcagtggctcatgcctgtaatcccagcactttggaaggccgaggggggtggatcacgaggtcaggagatcaagaccatcttggctgacacggtgaaaccccgtctctactaaaaatacaaaaaattagcttggtgtggtggtgggtacctgtagtcccagctactcgggaagctgaggcaggagaatggtgtgaacgcaggaggcggagcttgcagtgagccgagattgcgccactgcactccagcctgggcgacagaacaagactccatctcaaaaaaaagagaatgccccgcccagagccggtggggtcggggagggaatgcagggcaccagattgcttctgcatggagatcccgtctgccttggacactgttctccaggaggggttggtgcctccctacagggaagccccaggcccaactgtccttcccccacctagtgccctcaccagccctgatgtcaccttcaagtggattaggattcacatgttggaaaattgccactttatcttgatgtttattagaaaacattctcttcctgcctgtcaaaagtccacagtacagacacaaatcgtctatgctcacagtagaaataatgctcccttagttgtgcagtgagcatcctgcacagctgtccatgacagacctgaatccgcactctgtacctgccttccccaaacctcttttgtcacagctctcagaccctgttcagtcttctctcagggaagtggggggagccaggagcctggatggctgcagagtgcactggtgacatgcctttgggattccagggctggacagacaaccggctgaagtggaatgctgaagaatttggaaacatcagtgtcctgcgcctccccccggacatggtgtggctcccagagattgtgctggagaacaagttgagccaagccctccctgacctcccctctgtcaccctgcctcctttccttaagcctcctctgcctcccccaactctgccagtcgtgagtggccagagctcactatggttcttgtccctgtcccccagcaatgacggctccttccagatctcctactcctgcaacgtgcttgtctaccactacggcttcgtgtactggctgccacctgccatcttccgctcctcctgccccatctctgtcacctatttccccttcgactggcagaactgctccctcaagttcaggtgtgcccttttctccagccacccctcaccccaaagcaccctgccagaggccaaagaaggtgactgaagcaccctcagacagaggcccctgccctgtctggattagtgctgccctccccacaatggtcctcccttaccagcccttccccactctgtggccccagccactggccgagtgtcactctctgcccattgccctccccagttccctcaagtatacggccaaagagatcaccctgagcctgaaacaggatgccaaggagaaccgcacctaccccgtggagtggatcatcattgatcctgaaggcttcacaggtgctgggaacagccgccagtgggtgggcaggtccctcagacacacacagacacactggccctgtccaccccagagacacacacgtgcacacacacacacacttaggacaccaatacacagctcctcacacacgcagctagacacagaagggcagacacatatccgcccacagaggagcacacagacactcacacttcctgaatgcaaagctatcccaaaggcagagagagaaggtgccagggccctccccatgcctctgcccaggcccggaagtcatgcttctcccacatgagatgcctgtggctgacaggggtttagtctttcctgtgcctggtgagcccaggggtgtggttggcatgagggctgtgttatcctgatgggggtgtctgccacccctcctgacatcctcatccccgatctgtacccaggctcggatcctccatggggcctaccacttgccctgtccatcagaagggaccctgtctcactgtctcaggctggcacatcatggcagggatagttttactgtcactggctcattatccccaaggcccaggccgaggagtggctcaattaatgtccaggaggcttttctttgttactcaggaagacaggctcaatgtctgagagcatttgtttgacttggtgtcttaatctgcaatacctgtttttggctcgtgtatcttttgagccaaaagatactccttatttgagtcctgtatggcctcagcttctattttttccgaaaagataaaaaagaaatcagtcacagaggaagatttcccctcacagatggaaacttccatcccgaccccccagggaacgacacccaccaacgggaccccgtagacagcccatctgcgtctctggactggcttgccctgcccagcccctcattctgtccccaggccctgcctagcccccttggcctggcctgaccctaagatgtccatgtgccgccctcagagaacggggagtgggagatagtccaccggccggccagggtcaacgtggaccccagagcccctctggacagccccagccgccaggacatcaccttctacctcatcatccgccgcaagcccctcttctacatcatcaacatcctggtgccctgcgtgctcatctccttcatggtcaacctggtcttctacctaccggctgacagtgagcctccaggccccgtcccctgctccccctccccaagcccacctgagcacagccagccccagccctgccccctcacttcctcctgggagccacctggggtctccattcctggagctccctgcctggatccaggtgtgagggccaggtggccacccagagggagggctgtatgattctgggcaacatccccaaatggacagggcagggcatctccaagatgctacttcccacggactctcagaagaactgctaaactgtccctctgtcagggcagagaccaagtccctcacggtcaccagtgtgtgaccgtgggcctggcacacaggaggccctcaactgttgaaccagtgggtgaataacagggtctctaggacagtagggtgtgaggcagaaaacccatctatgctcacctgactctatgaggcagtggtttacaagttcagagtatttactatgagcagggcatagtgagtcccagggtcaaaggccacccagcccctgcccccggcaggacttgaggagggagaagtggggcaccttccatctgcagtggggttgggagggcttctagaggaggtggagtttgaatggacttgagcaggattgggtggggctaccacaggcaggaggagcaatgccaataaggagggggccaggcaggggctgaagggacctcagcaggggagccccccttcccgcccttgccatcacgtgcaggagctcaggtgggaagagcaagacagcactgggctggggtctctgagtgaggggctgggagttgaggtgttatcctggttctacaaggacaacctggcactttctaagcggggagtaacgcacgcaggtctgtgctccaggagggttcagtggcgtgggtgggttgtgacagctgattttcatgagcacttacccagtgccaggcagagtgatgcgtgttaaacacactctgtcaccacatttaacagttgagaaaactgatgcacagagaggttgggctacttgcccaaggtcacccagctagtaagtggcagagctgatatttgcacccaggcactctagctccataacccgtaattttcatcagggtatgatggtactacagaggtgccaggggccacagcgggaccctctaggaccggtgccccaaggtcacagctggaccctctaggaccggtgccccaaggtcacagctaagtctggcttccccaggtggtgagaagacatcagtggccatctcggtgctcctggctcagtctgtcttcctgctgctcatctccaagcgtctgcctgccacatccatggccatcccccttatcggcaagtgagtgacgctcaagcccggcctcaccctgcttgccagcccagccctgggagctccaagctgagtgtttgcccacaggttcctgctcttcggcatggtgctggtcaccatggttgtggtgatctgtgtcatcgtgctcaacatccacttccgaacacccagcacccatgtgctgtctgagggggtcaagaaggtgagtacttggcccggcgcaaaagctcaccactgtaatcctggcatttcaggaggctgaggcgggagaatctcttgagcccaggagttggagaccagcctgggcaacatagagacacccctgtctctataaacaatcaaaaaaattagccaagtgtggtggcgcatgcttgtattcccagctactcaagaggctgaggtggatcacttgagcctgggaggtcaaagctgcagtgagctgtgatcgcgccagggcactccagcctgggcaacagagtgagaccttgtctcaaaaaaaaaaaaaaaaaaaaaaaaaaaagaaatgagcactctcaatagccaaaagctggagactaagccaggtacagtggctcacacctggagtctcagctactcgggaggctgaggtgggaggatccctggaacccaggagttggaggttgcaatgtactatgatcacagttgcaccccagtctgggcaacagatcgagaccccatctctaaaaaaataaaataaaatgaaaagcagggaccgggtgtggtagctcacacctataatcccagcactttgggtggctgaggcgggtggatcacctgaggtcaagagttcgagaccaccctggccaacatggtgaaactccatctctactaaaaattcaaaaattagccaggcgtgatagtgtgcgcttgtaatcccagctactcggggggctgaggtacgagaatcgcttgaactcgggaggtggaggttgcagtgagccgagatctcaccactgcactccagcctgggcgacaagagacaagagcgaaactctgtctccaaaaaaaaaaaaaaaaaaaaaaaatctggaacttgtccaaaggccatctgtagaatgggtaaagacactggacatatactcccacgggagtgccgctcagccgtgcagaagcacctgcggctgctgcagccctgcacgtgtgaacctcctggcacagtgttccgtgaaagaaaccagacgcagcagcacatgctgcaggcctcactttgtaagaagttcaagaacaggccaaatcagtgtttggtgatggaagtcagaatggtggctatctctggggctgggagggtactgagtgggggcaggtgtgagggagatttttggggatcatgttcactatctcatcactggtgatttacccagtggaatgcatctgtaaaaattcatctagctatatacttaagatgtgctcattccactgtatgctgcaactcagaaggaagaaggggaggactgagtgcagggtgctcaggagggggctgcccttgcctctcggctgctgcagggccggctggctgttctgggacagctgaaggcagtttagcaactcttttttttcttttttgagatggagtctccctctgtcgcccaggctggagtgcagtggttcgatctcagctcactgcaacctctgcctcccaggttcaagtgattttcatgcctcagcctcctaagtagctgggattacaggcgcccgccaccatgcctggctaatttttgtatttttagtagcgatgggtttcaccacgttggccatgctggtctcgaactcctgacctcaagcgatccacctgcctcggcttcccaaagagctgggactataggcgtgagccactgtgcccggccttagcaactctttttgtctttcagcatttgatgggggagactctagcatttggagcatttaccttagtttttggtctttaattaatcatttttagtgaatgggttctgctccgcaccatgggtgatgtgggagagctggaagcaacctgcatgtgcatcagtaggagatcggggaatcaatgacagagtcagacgggggagcactttgtggcagccaggaatgaagtcacagatgttaggatgtgtaaaggtcaccccatgcttgtaaaatggcctttttggccagacacggtgcctcgcccgtaatcccagcactttgggaggccaagtcaggcagatcacgaggtcaggagagcaagaccatcctggccaaaatggtgaaaccccatctctactaaaaatacaaaaattagctgggcatggtggcgcgtgcctgtagtcccaactacttgggagactgaggcaagaaatcacttgaacccgagaggtggaggttgcagtgagccgagatcgcgccactgcactccagcctggtgacagaatgagactccgtctcaaaaacaaagaacaaaaaacaacgcctttcttgtggccccttgacatggccccagctcttcctggagaccctgccggagctcctgcacatgtcccgcccagcagaggatggacccagccctggggccctggtgcggaggagcagctccctgggatacatctccaaggccgaggagtacttcctgctcaagtcccgcagtgacctcatgttcgagaagcagtcagagcggcatgggctggccaggcgcctcaccactgcacgtgggtccccgctggtcttggttttcagcccatctgtgggaggtgggtggaggcaggcctcacacccactctggcccctcgtctgtaggccggcccccagcaagctctgagcaggcccagcaggaactcttcaatgagctgaagccagctgtggatggggcaaacttcattgttaaccacatgagggaccagaacaattacaatgaggtaagggaccacaggattgccatgtacaggtgttcaagtagggcactgattaagtgtattctatcttaagagggcagggttccccttagaggcacacaccaacttagatgagggagttaatgtgacacagattccaggcccccccgccagggagagagaactcctgcctggcaccctatagcagcactggggccaggcacacacacataggcacacagctccaccctgtccaggccacactctgagcatcccttaggatcccttctttctcccagctgccaatcattttctgtccctactcagttccaagcctgatactccagacagaaccagacattttaaaggtagccatatatggttattcaacattatacaacttctaaaaactatctcttgagaaagggcaccttttcccagttcacatatgggctggcagcagccctgacttgctgagatgggggagaagaagagaggggtctatccaccttcctcagcccctaggagagacccctgggcctcagttcctctctagccccagagccctgtgctacagcagagagggaggctatggtctgttcccgcctcctcaacagagtgatcagccctgcctgtggccagaggggcctgggaccttgctggggacaagccagcattatcctgcaagcccgaggcagcctctgcaggcacactgagccgccctctgcctccatggctgggccccagcttgggggtggggctttgtggcctgaggcccttctcaccccactctctctgcccctacccacaggagaaagacagctggaaccgagtggcccgcacagtggaccgcctctgcctgtttgtggtgacgcctgtcatggtggtgggcacagcctggatcttcctgcagggcgtttacaaccagccaccaccccagccttttcctggggacccctactcctacaacgtgcaggacaagcgcttcatctagggtgggcctgttggggagccaggagacagcagggtctgagagaggagccacagtccctaatgacacccactcctagccctgaggctcgtgcccctcagactggggaagagtccaaggaagggagggagcagccactcctcaatgctcaatggctcccctgaaatcaagacaggggccacccgagatggtctgagggtggacatcggctacagtgggtgggcaggacgatttggggggaggcccgaggctggctcaggggccagggaggaggccactcagggtggcctcagggggagagctctgataggggtgagacagatagggccccttctctgcttctcctcccccaaggtgtggggtagagcaggcaggaatctgcgccttcactctctggcccctccagcctccctcttcctacctacccttcaacctcaggcttctgaggcctcacctgggactgaggttgaggacacctccctccctccagaccccagagtatcctttcctagctctttctgccttgacctctctgcctaggtccctttgggaagttgaggactggagtggaaaggtcaggatcgacatccacaaagacttggggtcagcctgaggttgcacacacaatcctagaggaccagaacgcagcacctctccccaaagggtccctgccccccagcacctactcctctccaaattagggttgtcatgcattatttggggcatacatattctaaaaaatcattcgttgtttctctgaaatttgtcccctatttttatttgctaaatctagcaaccctatcccaaaggcagcctccactcaatcttatcctgagggccaaaggccaaggctgcaggaattgggagacaagggtctgtttgtatggtggtccacctccaagatggccccagtgatgcccagtattcacacccttgtgcagtcccctcactctgtaccagggtgggtctgggtaaccaatagaatgaggcagaagtgatggtacctcacttcccagatttggttaggaaagacactatggcctctttcttgctcattagccctcattctcacatcagttggatctctcactttggggaagccagctggcatgttaaggagccctatggagaggcccacatggcaaggaactaaggcctcctgccaacagccacgtgagtgaatgtggaagtggatcctctgccccagtagggccttcggatgagatcacagcccagtagacatcttatgtgcagccccatgaaagtccctaagccagaaccaccagctaagtgactcctggattcctgacccccagaaactgtgtgagataataaatgtgtgttgttttaagtgacaa

SEQ ID NO: 4 - protein, 517 aa, Homo sapiens
MEGPVLTLGLLAALAVCGSWGLNEEERLIRHLFQEKGYNKELRPVAHKEESVDVALALTLSNLISLKEVEETLTTNVWIEHGWTDNRLKWNAEEFGNISVLRLPPDMVWLPEIVLENNNDGSFQISYSCNVLVYHYGFVYWLPPAIFRSSCPISVTYFPFDWQNCSLKFSSLKYTAKEITLSLKQDAKENRTYPVEWIIIDPEGFTENGEWEIVHRPARVNVDPRAPLDSPSRQDITFYLIIRRKPLFYIINILVPCVLISFMVNLVFYLPADSGEKTSVAISVLLAQSVFLLLISKRLPATSMAIPLIGKFLLFGMVLVTMVVVICVIVLNIHFRTPSTHVLSEGVKKLFLETLPELLHMSRPAEDGPSPGALVRRSSSLGYISKAEEYFLLKSRSDLMFEKQSERHGLARRLTTARRPPASSEQAQQELFNELKPAVDGANFIVNHMRDQNNYNEEKDSWNRVARTVDRLCLFVVTPVMVVGTAWIFLQGVYNQPPPQPFPGDPYSYNVQDKRFI

SEQ ID NO: 5 - DNA, 34649 bp, Homo sapiens
aaggctatatttagcaggtttccggaagttgccggactggctgtgaggcggtcctgcctcgctgccttcagtccctagtgtctgggtccccgccctccagccgcctttgagtcgtgcctgggtcctcgcccttgcctcagaaccgcgaagaaaggaagctcgcgtgtttgctagaaaacctagttgggagtgcgaggcagagaacgttcagcacctttgttcctcccgaaccctcgggacagaggcagggttctgagggcagggattccccctcgtcttggccccaccgcccgggctgggcactaaactcgggccgcggcggggcgagcgaggcgggctccggagggagctgacgcctgatgatggcgcaggtagacacacctgccccttctcgggcggaaataaagtcttgttttgtgttcgttaaactttcgccgctaggcctcttatggcttccccggaggccactggtctgttttcagacgttcacgttccctctgccccgcaggtaacctataaccattttgtcttttagtccaacatgtttaccgtggctgatgtgttgagtcaagatgaactgcgcaaaaagctataccagacgtttaaggatcggggtatactggatacactcaaggtatcggatttaggcgtatctgtgtcagcttttacaagtgtaacctgtaacaggtagttcaaattcaatcaaggtttaggttttaataatcgtatgatacatagattgtattggtgaattacatttttatattcccgaataactctgtatcctgaaacattacagtctcttgaaaatgtttgagaaaatgttgagtttgagtcgtcttaaaggagcatattcaaataattaattgaactgacaataagataggagaaggaaatatttgtataatgaacacagtaagattaggcttgttttataaatatggcttataggttcctaaattaataagtgggtttgtaatacatttggatgaaggacattgacaccatatagaaaatactagtgtactgcttaataatagtttgggaaatgaaaaattttatctttaaactatattgaaatgtatgaatgtttagtttgggcagaaaatacctattagtatgctttatatttggattaacagccaggagtaggattagctcaacgtgttttcattgaaatatgcatttcaaaagcatattttacgtttaaaatatgtagctatatcctgtgtatgtatccttttttaatttaaattatatggtgagcatttccctgtttccttaaaagttttttgaaatcttcattttcagtggcaacaggcttatctttggatatttttgtaatgtatatagcagtcccctgttgttgaatattttggttatattctccaacagtccacagaggtgtgatgaagtggcagaattttttcctatacttaatatcccaatcgtaagctgctgaaatgggcttctagggaagtgaagttatgagtctgcaagtggatctggctaaccacccgtttcatttggaagctggggaaagaaagctttttctagaacccactggactgcttgtctcacggggtaagacaaagtgtgcaggggaaggtttctaacttctggccatggatctagaaccattatggaaatagaaggaaggtttccaatgaatgtagctcatctgtgtatatctctaatgaaacagtcctgctgaaatttctttcccttgtgtttcttttttatttttgtttttattttatgctagacacaacttcgaaaccagctaattcatgagttgatgcaccctgtattgagtggagaactgcagcctcggtccatttcagtagaagggagctccctcttaataggcgcctctaactctttagtggcagatcacttacaaagatgtggctatgaatattcactttctgttttctttccagaaagtggtttggcaaaagaaaaggtaaagtctttccttttctgtttctgaagtttttattaacaggttcttcctctgctgacagtaaagtgctgtatgatagctaagtgctcctcgactaggtccatttctgtttcctctttgaattcacattgtacctgcacataatatatttgttatataacaagtgggtactaaatttgaaattaatttcttggcgtctcatttagtctcacataaaacagtgatgtatagaatctctaaatgtttcagacctataattgatctatctatcctctatcttgtctaataagactctgccaatctgctgaatgtctgctgtaagcttggcactgtgataggcacactgcagatgttttgtgtgttacggatgaggaaccagactctggagaggtgaatcaatttgcccaacatcaagtaacttttaagtgacaatgcagggtggtaaatctagatctctaacatgagctctttttttcctgcactagtttcttcagatgtttctctttgtaattagataagtgagaaatacgtaatttaaaaaatctgtaaagttctcaaatattaaaaacacttgttttttttttttactacttttctaattattttaactatatttcttcaccattactgttgaacattagtactactttattattttaaaggcagatacagcagactttccctgtggatatgtgcgtgtttttttttttttaatagactttattttttcagagcagttttgggttcacagcaaagttaagtgggaagtacagagaattcccatatacctgctgcccctacacactcatagcctcccccactgtcaacatcttgcatcaaggtggtacatttgctacaatctataagcctaccctgacatgtcattatcacccagaggccatagtttacagtgaaggttgcagtgagccgagatcatgccactgcactccagcctgggtgacagagcgagactgtctcaaaaataaaataaatttcactcttggtggtgttcatatgtttttactttctttgtgttttctgtaattatccaaaagtttcatattccaaagttttagtgacacaagcttagtacagtatttgaatgaaaacttaaataatttgcatttcttcataagcaaccaaattttatttgtcagcattaggaatttatttattaatttatgtttttgagacagagtcttgctctgttacccagtctggagtgcaatggcgcagtcttggctcactgcaacctctgcctcctgtgttcaagcaattctcctgcctcagcctcccaagtagctgggattacaggtgcccaccactacacctggctaacttttttatttttagtagagaggaggtttcaccatgttggccaggctggtctcgaatcctgaccccaggtgatctgcccacctcaatctcccaaagagctgggataacaagcatgagccctcgtgtctggcctggaattcatttttgatacatcattctctaactttctaatcactttatacttttacttattgtgtaatagtcaataatacaattatatagcaggaattaatcctattcatacaacttaacggtttctactaatgtaaaatgcccatgcagaatatttactttaaaggaaaaccaattgaaaacaaatatcagtgttctcagagcagacatagtgaatggtatatactgtagtagaaatatattttaatagctacccaaaatgtctgttaaacaatattttaagtacactttaattacggttttaaggacagtaaaaatctatttacatttttaaacaatgaatactttttaaaaaattgtaattgaatgacccaggaactcagtcatgtagtcattggttcatcagatatttcagtgtcatctgtaaggcattaaacatttaggcatatcatctttgatgtgaagtacttagaagttaattagatgataaagatattttatccttttgaccttgatatgtttatagtaatttatttaacagtgtaagaaagagcttgaaatttgctttattagcatagttataatcttatttaatctgaaggatgtttcttaatttcatattcagaaacatatcctaatttatcatttaaacactgatataaaaatatgtctacttagtaacctattttttcttaaggtatttactatgcaggatctattacaactcattaaaatcaaccctacttccagtctctacaaatcactggtaagatggcttagtttctgtaatctactttggtttgttaattataactgaatagctgaataaaagtgaaatattttcttttaacaggtttcaggatctgataaagaaaatcaaaaaggtaggagccgtcatctttgtagagaacagcaacagttttctatgtactttttcctctaaaagaatgaagcaaatttttagggagaagagtaaaatttaatttgatttaaattatttgatttctgcaggtcatttcccctatatttccatttttgtaataacttttagatattcaattaaaaaaactgtagacagtatcaaaggccctacagacaggctgaaagatactgtttgtaaaaatacccactgttgggaatatttctgcaaaaaaaaaaaaaaaaaactaataacttttaggccaagtgtctttgtatactaggtatccctctcaagtataattggtagggtattagatgtattaatatttccttaaagaatgagagttgtgttcagtaatgtgttatatatcttttgttcttaaatgtttatacaggccgggcgtggtggctcatgcctgtaatcccagcactttgggaggctgaggcgggtggatcacctgaggtcgggagttcgagatcagcctgaccaacctggagaaaccccgtttctactaaaaatacaaaaaaattagctaggcgtagtggcgcatgcttgtaatcacagctactcaggaggctgaggcaggagaatcgcttgaacccggaaggcagaggttgcggtgagctgagatcacgccattgcactcctgcctgggcaacaagagcaaaactccgtctcaaaaaaaaaaaaaatgtttatatagacctaataaattgccttaattttggccttgataatagccattcatagagtccataactactgtgggtttcaggccattggttagacttgatgatgggctttgtagcatgaacataagctggcaacttggctttgatgcatagttattctttaggtcttttaaaataatctgttagtaatagtccttttgtgttggtacacccttggattttgtctgttgcctgcactatcatccccacaaggacattcatttattcatccattcattcgccaattcatttagaacttaatcatttgaatacttattttctgccagccattaagtctgtgacttaatcgccaagtctcttggtagtaatgttagcagaatataaataaattggagcacaagatattctggactgcccgcaaactagaccatctctactgaagttcagtatggtaaatgatcctatattctgtactctaagtgtcgtccagtgtgactctctgtgattatggaaatgtctgtgtctatgctgtttaatgtggtagctgctatcctcatgtggcttttgagccttgaaatgtggctagtgtgactggataactgaatttttaatttacatttaattagctacacttgcatagtgactaccatattagcataattctgaggtatatagctagtatcttttgcttaactattacttcaaaaggaaatttgtggcttgaagggatattaagaaataatctatgggccaggcacggtggctcatgcttgtaatcccagcactttgggagggcaaacctggctgatcacttgaggtcaggggttcaagaccagcctggccaacatggtgaaaccccatctctactaaaaatacaaaaattagccaggcgtggtggtgagtgcctgtaatcccagctacttgggaggctgaggcaggagaatcgcttgaaccagagaggcgaaggttgcggtgagccaagatagcgccactgcactccagcctgggtgacagagctggactccatctcaaaaaaaaaaaaaaaatctatgtagttactatagatacattatccttaaaagtagtttttccatggccgggcgcagtggctcacgcctgtaatcccagcactttgggaggctgaggcgggcggatcacgaggtcgggagagcaagaccatcctggccaacatggtgaaaccccgtctctactaaaatacaaaaaaaagttagccaggcctggtggcgtgcacctgtagtcccagctatttgggaggctgaggcaggggaatcgcttgaacccaggaggcagaggttacagtgagccaagatcacgccactgcgctccagcctagcgacagagcaagactccgtctcaaaaaaaaaaaaatagtttttacacagtctctttaaatgcatctggttcagaaagacatctggccgacagcccttaccagcttcacctagcatcccagtaaaatttctggaagccagaaaaactatgagtagcagataggtcaggcatcctagtgccaaaatttggatagaactcttagctaacaaaatagctcctggtaagataaaatttttttaaaaattggtgtcttctaattaagtaacagaaaacatgtaggaagatattgtgtacttaaccgttgtctgtcccctgactcagacctatggtcttatcctaccatatctatgctcagggggtgctaagctgttgaatggccttggtacttttcctcctagattctagtcacccattcttcccactgctaattttcctttcagagataatgatatctgttatgcgtgtctgtgtgaagagaccaccaaacaggctttgtgtgaggaacaaggctgtttattcacttgggtgcaagtgggttgagtccgaaaagagagtcagtgaagggagataggagaggggcagctttatagggcttgagtaggcagtggaaagttacagttaaaggtggttatttattgttagcaggggagggggtcccaaggtgcatggtggagagatcttgggactcattgtccagaagaagaatgtcacaaggtcgattgatcagttggggcagggcagaacaagtcataatggtggaatgtcgtaaggttggtcagtcagttaaggcaggagctgtttcacttctgtggttttttagctggctcctgcaggccatctggacgtatatatgcaggttacgggggttacaatggctgagcttcggctcagaggcctgacaatatccagaaaatgatgtgcacaaaatttggatgagggaagaaaatttggacatcggccctttgctttttggaagtaaaaattcttatctgcaattggcaaaagaataagacatatacatcaatggggacagaattaggaagtccagaaatacatccacacaaatatagtcaattgattttttttttaacaaaggtgcaaaggcaattcaatagaggaaagatagtcttttcaacaagtggtgctgtaacagttggatattcatatgcgcaaaaatgaacctagacacagatcttatttattataccttacacaaaaactaactcaaaatgaaccatagacctaaatgtaaaatgcaaaactataaaacttccagatgagaacagtagaaagtctgtgatcttgggtttcgtgatgagatgtaacaccaagagcaagatacatgaaagaaaaaagtagatcagttagactttattaaaattaaaaacatctctgtgaaagacactgttctttttgttttgtttttgagacggagtttcactctgccacccaggctggagtgcagtggcgtgacctcggctcactgcagcctctgcctcctgggttcaagtgattctcctgtctcagcctcctgagtagctggaactacaggcgcctgccaccacgcctggctaatttttttgtgttttcaatagagatggggttcaccatgttgatcaggctggtctcgatcccctgacctcaggtgatcgcctgcctcagcctcccagagtgctgggatgacaagcgtgagccactgtaccctgccaaaagacgctgttaagagaatgaaagacccagtgtcgaaacccatagagctttacgtcatcaagagtgaaccttaatgtttgcaaatttaggtcaggtgatcccaggatggtatgcagactgtgacaaaatctaatccccttcctgaagggagtgggggtgggggaaaaggtgctgagctaactactgtttttagttccaagaaactaaacatttcttaagtaatttatgcttgtggtttaaaacagtttcaaactattcagaaggatataaagtgaaagcaaagtagcagtttctgcccatgttctctaatctcacgctccactgataactagaattaacagtttcactccactgataactagaattaacagtttcttgtttatcttctagaattgtttgaggttaaaactatgtatttgtaattaaaacacaatcaattgggattatatcgtagatactgtatgcaatttgctttttttaatccaccaatgtatctttctgtagcagtatagactaattatttttaaataatgtatttaaccccctattgatggagatctggttgttttattgtttgctttttgccattacaggtaacctatgtgcagtgtgcaccctttgtgcccttgtgaaagtatacctgtgtaaattcatagaagtggaatgactagattaaagggcacatgcatttcgaatatatataagcactgacaaatttctcttccaagtgaatgagtatagctatatatccactcccttgccaacacttagcattatacaagttttaatcttagcagtgttatagggaaaataatggtttctctgttgtattaatttgcatttatgattttgttcatgtttattcagcatctaaaaattgtgttcatctttgacaatgtagttttttctgcaaactacccatgtttttccccatttttctgattttttttttttaaactgatttgtaagagttctttgatgttatgaaaatgtcatcactttagtcttggttatgcctccatattattgcaactatttttcccagtgtgttatttttttattttatgccatatgtaagttttcagtttttatgtagttagattgataaatatttctccttattccttccaggttctgtatcatgcttgggaaggccttttctcagatttattaaaagatatgactgggcacagtggctcatgcttgtgatcccagcactttgggaggcccaggcaggaggattgcttgaggccatgagtttgagactagcctgggcaacatagcaagaccctgtttatacaaaaagtaaaattagctgggcgtggtgggtggtggtgtgcacctctagtcccagctacttgggagactgatgtaggaggattgcttgagcccaggaggtcgaggccgcagtgagccatgattacaccactgcactccagcctgggtgacagagcaagacttttgtctctaaaaaaaaggaaagatatataatgtaaaaaatgataatgtcctaaaactaagattgtaaaaacagtgactgagcagtggttgaaagttctgaaacaaaactgtatgcatatgttttttaggttttcttatgcattttttaaaagaattggcagaatatcatcaagctaaagagagttgtaatatggaaactcagacaagttcgacatttaacagagattctctgggtaattatagccttctttcttaatttcagttctgctgttttcattttgaatgaaggaaattatctgatttaccatattgtgtgattgctccttgaactggagggatgcagccggcaggcaacaagggaattcatttctggaatcatcttgggggaccaggaagtgctctccagtgtcattccctagcctcatgaatgccagggctacactggccaaatcatgcagggattcaaaggcccatattcttccttgtttgttgagtttgacttctcttaactgggaggttcttcctcgtgtcttgtctaactttacagccacccagttagaagattataaactacttgctttgcaaagtactagagaagtcagtgacttatcacttcattttatagttgaggaaaccgaggtcctcagaggaagagcaacttggaaacactcagtctgcatcagaactaatagtggagtccaagttctcccatccatgatctggagctttttgtactatccagctggtctgcagtaccatcctgtctgtcagtttcgtgctcagtagagatgggaaatagctgtttaaaacgatatgcttaatggatttcttggcccttccttactcttaaatggtaacttgcaagaagataagttcataattcataaaatgtattatatgactatgcctttaagtgtatttttaattcaattagaaacatattacttgctaattatcaagcagtgctgttcagtggtgtgagccacatacataattttaaattttctagtagccacgttgaaaaaagtaaaaagaaacgggtgaaatttgttttaataatatatttaacccaatacatgcaaaatattatttcagcatatattcaatataaaaaatactaagatatttcacatttattttttgcactgtctttgaaatctcatgtgttttttacatttaaagcacatctcagttgagtctggtcacatttgaagtgtcaatggccccatgtggctggagagtcctgtgttggacagcatctggaaaatacagaaaagtagatggaaaaacatgtctaaagtcatccctaccagagataaacactatcgatgttttaatctacttctgccagcctttttcccctctgtgcatactttttgggtgggcgttatacacggttgagattgtactctgggttcagatttgcactttgctatgtggttgattctgatccatagttggtttgagggccatggactaagggaagagtcagtagacctcactttaatcctggttatgctgtcatgtagtcacttattaagctatatcagcatttgttctttatgtgtaaaggggaggggttgatatacgtgatctttgattcttttaaagttattgttttgaatatgtaagtcagctttaaccagagtccaataaagagctctctgccttagcacttagagagtaggaagagactccagtattttctgacttaaactgtactcttggctttctttttcctctaacatttcatgatgaacattttcaaacatacagaaaagttgaaacaattttagcgaacacttgtatacccaccacctagatgtcactattacacttgtgttatacttgcttcatcatttttatctgtccatccattcatccaccttcctttttttgtatttcaaagtaagttgcagataatccctacactttcccctaagtatcctctttacttttgaaccagaggtctggcgtcttacgcacctgacgatgtttctatgtcctaatttgatgtgttattttttaatagctgagaagcttcagcttattgatgatcagtttgcagatgcttaccctcagcgtatcaagttcgaatctttagaaataaagctaaatgagtataagagagaaatagaagagcaacttcgggcagaaatgtgtcaaaaggtaagctttatcttgttactgtaaacaagagtgatgtttttgtttgtcttctaaagtcttaaccataggtatatgggaaaatatctagaacttttaataacgaatgggatactgtactgttgtgcaaatttttttttatttctggtgacatttgtttatgccttttgagtgaatcctacaaatagagtgaatgagataaaactaacatgaaataaatatatttggacagagcattaatgttaaacctagatgtagagagagaacttgttcctgtttttatagtataatagttggtatttttaattttttgtgatcaatttgcagttgaagttttttaaagataccgagatagcaaaaattaaaatggaagcaaaaaaaaagtatgaaaaggagttaaccatgttccagaatgattttgaaaaagcttgtcaagcaaaatctgaagctctcgttcttcgggaaaagagtacccttgaaagaattcacaagcaccaagaggtggtatttacaaatattttatgggtggctatttcctgcagctattagtaggttggctcgagatccagcaacaggatggtacagttgatggaacaaggccccagaagagcaatagggactggggccaagagtgcaaatagaaggatggtccttgaaaaggatacacaaatttgcttcctctgagactgatggaaaggcgagaactgtggaggtgaacaatcaagttgggattatgagaaacacaccctaaataagctccatctcctcaggcagattagagggttagatcttgggttttaggagcagattggaggtgcagagtagttcctgtgggtaagggaagaacagccctttaaagcagagaggactgatcacctgtattgagggctcagctgtggttgggggagcctggaattgagagaggtcaaaccaggtgcttgtaagtgagttttctgttctagttctggggaggatttgtaagtatctctctgtccctttcagtgagggtggaaagatggagatgcttgggaagtagagcttttcagagccttatttgactagagaaaggcagcctacttaatcgaagattctggggctctcttgggtagtgaagggaagcagaggagagggcaggtggctgctaacctagggggaaaggaagggttgagtggcagtctcagtgatcaaggactcgatctggatagactggtaggtggaagaatgaggatggtccaagattacagaattgcaggatgaggtttcaggtggagactagaaaccaaatgcagtatgctgccattggagagagccatggaaatgagcaagggtgaaggtccctggggtaaaggagtcaccacaagggtcatccatgtgaccatttgatcttgtcaccccagaaagtaactggacaggagacagagagggtgaggagtgagagggagtccatgttggcaagcaggattggatctactcctttaaatcatattcctttcccaagggcgtgtcttagaccaaactagatttacagcactatttccaacatacatccagaactactgctgtcagatgttgaaagtaggaatgcttccccctagtgtccactctcgcctggggcttctcaataagacctagttgtttaatgctaagggcaccccctctaaaattttgtatagcatttctgggaattgggtttgcttcagctataaaaatgaatgtcagaagcacatatctttgagatgattggattgtgtttagactaataacttcaaccttcaagataggtgactgactagatccctgtttatttatctgatcatctgaaggctttgaagaagattgtcatcctcataagaagcaccatgtctttattccctcacctggactgtccatccccttctctccctgataaaaaccatagtgtctttcaagacccagcttggatgtcacctgggtgatgccgtccctgactcccactgagcgacccatttaggcctcattcctgcatcagtctttatgtacttcagttacaaaatcatcacatcttagtgtgattgtttctcactccctgactaaattgtgaggtctttagagatgaggactatatctgtctacctttttatatccagttcccagtatgctgcttgacatgtcataggtagttagtaaattctttctctgtgaacacacaaatggaaggatggcccattcttttaggagttcatatgagcttgctaactctgagtcagaatgacccgtgaactgaaacattcagacgacaccaccactaaaaaccatggggattcaattcttttggagttttactgctgaatgtacattttgcttaatttttctttctggggaacttgccaaaatttaggtaagggcgccaggtgtggtggctcatgcttgtagtcccagcaccttgggaagccaaggcaggcatatcgcttgagtccagaagttcgacaccagcctgggcagcatggcaaaaccccatctctacaaaaatacaaaaaatcagccggacttggtggcgtgtgcctgtagtgcctgcagctactcggtaggctggggtgggaggaccccttgagcttgggaggtggaggttgcagtgagccaagatcaccccactgcactccagcctgtgtgacagagtgagaccctgtctcaaaaaaaaaaaaaaaaaaatttttttagataagggactgagagatgttaaagaactaaatagcataaatttcacatggcatgttaggactgtagggtaatggtagtttaacagtcattgggggagtaaatttttatgcaactagaatacgcaaaaagtataccttgagtcggaatctcttgaaggtgaaattgttatcctaaatgtctgtactttgctttttggaatgtaggaagcagtatattcattcaaatctgttttgctttcattagcttgcttgctaaaaattaatgcttttctatacagattgaaacaaaagaaatttatgctcaaaggcaacttttactaaaagatatggatttgctaagaggaagagaagcagagctgaagcaaagagttgaagcttttgaattgtaagtaatgcatgttcattttggatattcagaatgatgagattaaaaagaattactaaatatatatctaaatattctaatgttcattgccaagtagagttcttatttgtaaaggggatatcacctagaaggtacaaattaagaggaacaaacactagggttttgtttttgaaatattaaacattaagatgaaaagacgaatgagatgctatcatcaggctacagtaagaccagacagattatttggagaagctgttaatactggaacagatcgtatgttttgcagttacattcagtccctcagatctgatagttccgtgtgtgtatgtatagtaactgaattccatatatccaggcctgcagcttttaccagctgtgtgctcagaaaaggaagtatggtggtccaacttgacttgtacttggtgaaaccatttctttgttactcactgtttctaagtgctcacaaatgtttcatccttgagatcttacctgggattgatggcaagttcacctgtctatagtttgtgcaataagccttctcttcctttgggaatctgctattgacacccatagatactccaggaatcttagttcattaaagaatttggctccattaatgtttttttctcacttctataggcttgatttgtttgatttcaactctctgtctaccttactctctttttggcaataatgaaaaggtaaattgatcaagagagaggaaataggcacaaaattggggcagagagagttcatcattcctttacctccattttctctactcttgttccctccttctcagcatataaactaaataaatgtagtttacctctccatggctttccagattaccagcagagggagctaatacctagagcctttacctgttcttagactagtcagcattttgtagcacttctcaggatggctggatctcaccacccatgaacctacctccctggctaaggagttggtgctatggttgatttaaagtctcactatgaagaccattctattcttcagtatttggaagccctgattgatccatctatcttttgccctctcttttggtacttttttcaatattcaatcaatagggttttttgtttgttttgttttgtttttaagacacagtgtctctctgtattgcccaggctggtctcaaacacttgggctcaagcaatcctcctgcctcagccttctgaaaagctgggattataggtgcgggccaccacacttggctaaagctgattggttattaaatgacaaaaacacatattgtaccttgaatatgtatggactaattaattaaatcccacagttagaaacagcattatagaagatttaagcacataagtacacttatttgttactttgtaactaataatatcattatttcatcccaggattgattttggctatttatcacctataaccattgtttgagtgtttattttcagtgagaaaccacttccctcttgagactctcccactcccctcagcccaaagcacagtcaattctgctagtttcaatatgctgtaactaggtcagttcataaaatacactgaggacttctggctctttccttctacttcccagtagtgatatcatgtagcagttttagtctgtggaactagacacatgtgattttttcctaaatttgttagctcagctatggtagtttatttactttttatatttttgttaatttcaggaaccagaagctccaggaagaaaaacataaaagcataactgaggcacttaggagacaggagcagaatataaagagttttgaggagacctatgaccgaaagctcaagaatgaacttctaaagtaattgtttagcatttttaaataactaatatgtttaaattaaattggtagaaacataacaaaaactgacaaagtagtctgtaacttaggcaaactttagtgtttgaaaaaaaaaaaacatagttttatcgatacagtcaatcctttcctgcatttgagttaggatagtttttaaaagataagggccgggtgtggtggctcatgcctataatcccagcactctgggaggctgaggtgggcggatcacctgaggtcaggagtgcaagaccagcctagccaacatggtgaaaccccatctctactaaaaatacaaaaattagctgggtgtggtggtgggcacttgtaatcccagctactggggaggctgaggcaggagaatcacttgaacccgggaggcagacgttgcagtgaactgaagttgtgctactgcactctactagcctgcgtgacagtgacaatccatctcaaaaattaacaacaataaaaaaatacagagaagcacatcctctgcgcttcttatggcttctctaacgtttattgtgggctgtgatttgctttaattttcaggacaccttgtgacttgcttagcttgcatagttgataagctgtaaaattggaattataaccacttttagttatcttttcctctacctcactcatacagtcagaaggatggggttatctgacaatatataaattatactagtggtcatagtatttgtcagtgaacatgtgccttgtattccttcaagattcagcaaagccagaatcaaaagagctaaaattaactatgtgaggcaaaaagtgatatagggaaaggaaaatatggacaactatggtaactttggcttttctgtagtctgagttttgtgtatcagtgaataatatctcagtgctacgacattatgcccatgtggtaacatttctcttcagtgtgtgggaaagcatctggcacataaaaagtgctcagttaatatttgttgtaaatgtgtcacgaggaaatgattcaactcaggtgctctgggcatttcttatttggcctcttttattgcctttctcataatttgtcatcgatattccattacataatattgcaaaggtttcttgaggtaatcctttaaacaaatcctatttttaaaaaatatggcagcttttttatctattgattttgaaatgatgtattttacccacatcttctatgtcagtttctatactaaaatagctaaaatggaagtgtctgtagttgctgaatttttaggaataaatgaattaaagtatgtgtgttaattttacatagttatggagctagtgaactatttggtgtcattgtgacagcttccacaggctgcatggtgtctgcctggctttgggaatcctcatatgactttggcaggtgttggagtttggaggctcttcgccacaggagtgcttctatttccttttggaaccaaaagggcagctggtaacagctgggaaagggaagtgaaactgtgaaaatgtgccttttggtattgctaatccggatataatgctcttggcagttggctctcaggactgtgcttagtccctgagcacaaaagttcttaccttggttgggggtgggcagatggtacaggtggattggaagtgaccgtctgattatcatttgggattgagtctgttgtgtgctgtgtaaatttaatttacccctttgctctttgtgtcagttgagaccaactgaaaagtgattgctttcagtaagtaaccttatgataacacgacgcttcattttgtgtgattgagttttgggacccagtttataggatcaaggaagggttttactgggcattttatgttcaggggttatatccctggctttagtattgaggactttgaagtttacaagttgtcatgtttagcaccctcaggtgctcctgtgccatagataagctcctgcactgataacagtctttccagaaaaatgcctgaggagctcatatttagtcattctgattctcaggtatcaacttgaactgaaggatgactacatcattagaactaatcgactgattgaagatgaaaggaagaataaaggtgatgtttggggggaaaataagctgtatttttcagttctgctgtaggttattagcttcccaagttgggtcttttctatattctaaaaaatacagcttacacttcattgttcatacaaaattacacattttttgtaattttaattttataaattaaaaatcatggtcttcactgccttttgaggaaccttcatgtttaatagtttgtatattcacaaaggccagtgatttatcatggatattttatccaactttatttcatatattttgataaatctgcaattgtcaggaacgtagcagcaacttattgctgtcaagtacgtattactcctaaccatgagagactttatttttcacttacggaaaacttttaacttctctgtcctctgtgacctagtttcttatttcttttgcttctaatatatttttatgctttataatatttttacttgatgtataaccttctgaactcttgtgtacattggcctgagactatggaagttgaataatttttcaatcttcagatgttttacatttcagtgtatttttttttttttttgagacggagtctcgctctgtcacctaggctggagtgcagtggtgcgatctcggctcactacaagctccacctcccaggttcacgccattcttccacctcagcctccccagtagctgggactacaggcacccaccaacacgcccggctaattttttgtatttttagtagaggcggggtctcagcgtgttagccaggatgatctcgatctcctgacctcgtgatccgcccgcctcggcctcccaaagtgctgggattacaggcgtgagccaccacgcccgacccatttcaatgtatttctaggaaattgctgtaacaagaagttgaagttttggtggaaatttcaagtagattcctgggaggaaaccagggttagatagttgatgttgaccagatacccaatgtgtggctactgtctttttttttttttttttttaagagacggagtcttgctctgttgcccaggctggagtacagtggcacaatctcagctcactgcaacctctgcctcctgggttcaagtgattcttgtgcctcagcctcccaagtagctgggactacaggtgtgcgccaccatgcctggctaatttttgtagagagagagtttcaccatgttggccaggctggtctcgaactcgtgacctcaggtggtccgcctgacttggcctcccaaagtgctgggattacaggcgtgagccactgtgcccagccccttttactatcttgtggagactaatacttcttttatgcattaataccattacgtatgtaacaaattatggtttgatgatatatctacatagacttgtgttagatgaagtgaaaactacaaaatagtaactacaatatagtaacagacagatctttgtcttcaaggaagttaagagctgtgggtattagggccctgtgctttgagcacatggtataactctggttagcatgtatagcaagtggaatttcaccacatatatgacagttacagcttcacatcacctgttgggtaacagggtttatttcttacttgcccgctacatctgctatttggattgtgaaatagtggtcattaggtctgacatactggccataaatattaaatggcttttgtattcactaggaaaacattatggtgtttaattggtgggctcttttttcagaaaaagctgttcatttgcaagaggagctcatagctattaattcaaaaaaggaggaactcaatcaatctgtaaatcgtgtgaaagaacttgaggtaattgttaagcatgttggtttttgaaatagattttaagcaatatatgaaattttagtcatacataatttatcctaagtcatcctgttgagatgtttggactgccatttatatggctaagaaggtgttagctgaagttaattcaatagttcttaatttcagtcagtgtcacataggaaagtgtagatagagctttgggtcctggagtcctgcccacatcctgtctgtgtctctaactgcttgtgtgtcgctaggtaagttctgtgactgcaggttcctgagctgtaaactaggatgttttccacattatagggttgttgagggaattcagtaagctaacttatgtgcctagttcatagcaggtggccattactattagtttctacatcagcctgttatctccttccatcagcagcaggtaaacaaaattcctgtcattacattgttatcttacagattaaaacaaaatgaggtacatttttcacatatcattgcttctttacttttctgttcattcgtgtgcttgctgtctgaaggatgaagctggaactttaggtacttacaacatattttgtatatgaaatttattttagcaactgtgacttatgtgagaactttgtaggctttttactcaaatatgagatatactaagaaaagggaagcacttcacaacattttacagaatcttttttcctttctttcccttttttttttttttttttttttgagacagagtcttgttctttcgcccaggctggagtgcagtggtgtgatcttggctcactgcaaccaacctccacctcccgggttcaagtgattctcatgtctcagctcccaagtagctgggatttcagccatgtgccaccacacccagctaattgttgtatttttagtagagatggggtttcaccatgttgcccagggtggtctcgaactcctgagctcaagcaatcctcttgcctcagcctcccaaagtgctgcgattacgggcgtgagccaccatgctcagccatttttatcttacctttcatatttaaaaaatatatattgctatgatgtgtgattattgttgggttcttggttgcctctggaaaatgggatgataatcttagaaggacttgcttcatgggatgcggcctataaaagttctgccccaactgtagggcggaagataattttcgttattgtagttagagtcttattgtagagaatcagacttctgtctagtgaccttaattaaattgtgacaccatgcttaaaggagcctgccagcttttacttttgcagtactgtaaagtcattattcaaatgtaaattttcctttttgaattttagcttgaattagagtctgtcaaagcccagtctttggcaataacaaaacaaaaccatatgctgaatgaaaaggttaaagagatgagtgattattcactactaaaagaagagaaactggagcttctggcacaaaataaattacttaaacaacaactggaagagagtagaaatgaaaacctgcgtctcctaaaccgtatgtatttttcttttcttctgacttgcgtgttttagtaattcgcattaggtcagtattataaaactatgctttgtacttgtataaggtagggggcttacattgggaagatttataaaattaagattcttggattaaactctgcaaacctgcctataggtggtatcaaagcttcccttgccctctgactgctgattgggtttggccagtggggacaccagcctctacatacagtggccctaggctggccactgtgcctcatggccaagtgaggccatagtgcctgcgattacctcttccaagtgctctgcaccaccaccctgtctctagtgctgagaatttctccctcctctgattccccaggcccaaggagcgctaacagtatggccctgttactagcccacccagggaactccaccatcctttgtgcataccctgaataagtcaacctttattaaagggttcttagatgaccttgaccgtgagagccatctgccttctgcctggatcccaactgctgctgtcagatgcccagatcatattggatcccagggctgtcatcaacaggtagaccagatagagagctccttctgtgcacagtagaggagagaaacaggctttcaggttaatttgagaatttgaaagagttcttttacttggagtaggactccaagggtaataaagtttgcattaacatgcactaaattcttttgttgtgaaatttgagagtcaggattgctctgagctcatttaatagaattattatcatatttattgagtcagtacaaagcaaagaacactttaaaacccctttaactgtttttgttaagttaaataagaaaacttaaggttggtaatgactaggattttttttttttttttaccttcttaggcctagctcagccggctcctgaacttgcagtctttcagaaagaactacggaaagccgaaaaggctatagtggttgagcatgaggagttcgaaagctgcaggcaagctctgcacaaacaactgcaagacgaagtgagtattgctcttcttcagttctagtgtgataccagtacacttcatagttacgtaaacttggcacaagtcacactagtgtaaatcagatttattttaacatcaaacattactcccccaaatatgctaaaggtatcctttctcatctgagaaaattctgcagtgataacgtgactttatattcgtaatagtaataaaatggagaagaaagcaaactcacctaaacataaaattttctgagtgcctgatggtgcccactgttatctctcgattctcaccctgataagtattacaaacattcactgtcttctgatttctgcctgcatgccctagagttctttgatatgactgaaaaagatggtgaagaacttgtttgtgtgttctgcttgtgtttttttttaatagggaccctgttgtttactgtcataaagcttcttggaattggcagaacaaaaagagtacaaacatgataagagaacttttccttttgaagcaagctgtgatttgttttacattgatttcttttcctattctgaatcttttcagattgagcattctgcacagctgaaggcccagattctaggttacaaagcttctgtaaagagtttaactactcaggttgccgatttaaaattgcaactgaagcaaactcagacaggttagagacgttttaacccataaatatttttgtatgtataaagcttctggtgtctgtgaaaatgtaatgatcataatttattgaatattaattattgttttaggggaaaagccatagaaatatgtgtcatcttagaagtaaaactccctatccattttggtaataccatctggatcatcagcaaaagtattttgcttcataggtgcctcatggcttgggagagtctcatgccccaataggaaaggcgtggtggtaacatagaagtccccatattcattataggatttccttttttatttgttaccccaatgttaacaccaattcagtagttttacggattccttgatagatatataaatatacaggacaagcagggtggtttagcaaaaagaatattgccttcagaatcagaactgttcttcttttggacccgttttgaagttgtttgaccttgggcatgttactttaacttccttgggcctcagtctcctcatttgtaatggggataataatacctactgagccatgatgaaaaagatgaaatgggtttcagtccagtgcctgggacataaaagacactcaggaaatggttattggtatcattttattattgtgtcttcactgtggatgcatctctgccccttcctacttcgtaagaaggatattaaagttcagatactttattcttcagttgctttcaagttcaaagaaagtacgtatgtgttaccagttcaactgggtctgagccttccttgttcccacctgcattgtttcctcatcagctccttgctctcttctaccagcacttgttttatttttatctctactcgtttctgcttttttctgttcctcattttctttcagttctgtttgtgaaacttctcacagctgaaatcatagcagtctcctatcaataaaaaatagttgaatgaggatagaactctttcgcatgcatgtgttgccgagggcaagcttctttcttgtagcatcacggggaggcattgcaggagagaggggcaggtgcactggctttgcattaggaaagcccagtagctcttagacttgctaaccgtgtgacccagcctcagtaagctttagtccccccatctgtaaaatgggagcagtgagagtttcttgaccacagtgttgttgtgaatgcaggtcctcacttccttatatgaaactcgggccatatgctgtggatttcgcaatagccctgggagttctgaacagcatcctatagtaaagcacattaattattttgcagtcaactgtatgaatattcatgctgggataaataaagattataaatgggtttacatcagttcaggtcaaacttttcaaccaaatgagttcaagtctggttgggctttgccaccaaataaattatgaataaattttcagttctcagagccttgtggctttcaaaattgtgcataatggattctgaaattatatcatgttacaaaagacatacaaagctgtagctggtacaataagctctcagtaaatgttagtggttatcgttaccatggcttcagaaactgtatagtgcaagtttgtccttattactctcttccatttttcaaaaaaataatattctcaagtatattttcttctctgccttgtccacttacttctgaaattggctttttgtaccctgcagccctagagaatgaagtgtactgcaatccaaagcagtctgtgatcgatcgttctgtcaatggattaataaatggcaatgtggtgccttgcaatggtgagataagtggggatttcttgaacaatccttttaaacaggaaaacgttctagcacgtatggttgcatcaaggatcacaaattatccaactgcatgggtggagggtagttcccctgattctgaccttgagtttgtagccaatactaaggcaagggtcaaagagcttcagcaagaggccgaacgcttggaaaaggctttcagaagttaccatcggagagtcattaaaaactctgccaaaagcccactagcagcaaagagcccaccatctctgcacttgctggaagccttcaaaaacattacttccagttccccggaaagacatatttttggagaggacagagttgtctctgagcagcctcaagtgggcacacttgaagaaaggaatgacgtcgtggaagcactgacaggcagtgcagcctcgaggctccgcgggggcacttcctccagacgcctctcttccacaccccttccaaaagcaaaaagaagcctcgaaagtgaaatgtatctggaaggtaagccacccgcacaaagggttgcggggtgctctggagttgggtagccaccctgcccacgacacagggttgccgtgagggtcagcgggccagagtggcaaggtctagtgtttggcacacagagctgtttagagagtgatagttgccttgcctttgctgcctgttggtttcctgcattttattattgccactgcaatttaatttaggtgcttgaatcattagttttctggatcttatgcatcataattggctatttgtgaggataacagtttattttcaaactagtagagctctttagaaaccacgttggtatcttctccgtgcaattggtaatattcttgccttggttctttctgcaccttaggtctgggcagatcacacattgcttcccccagtccttgtcctgacagaatgcccctaccatcacccactgagtctaggcacagcctctccatccctcctgtctccagccctccggagcagaaagtggggtaagtataacgttctgattgattagcttcagctgaataatgttacttgctctgtcagccttcacttgttttactgggattttttttttttgagataattattatagatcatgtggcagtatagaatttgcaatcagattgcaaaatgatatgtcatctttgagaatcatctaaattacctggagggaaaaagattgcttttagcaaataagtggataatgcttatttgctaaacttgatatatggaccatgcaatctggtattaataagcatcttcctagttctgtgaatagatttggtttattaagataaaaaacaaatgtacaaaatctgaaagcaaacaaatggaggttatttataaagttggaacaattttacacatcattaaaaagtcatttttaaaatattttggcattgaaatataaacagataaggttctgacctgcatatcattgaaataaattcaaacgtggtagcaggctctggtgtatgattgttgaaacaggaaggagtggatgtttttagaaactagtccactgggtcagccaggctatgatttgagtcatgagcagactcctacccatacctgggccccacagcagagggaactgactccttagctccaggctcgatctcgggcatctgcatgttaatgtagttctctgccacatgggcctgtcgtagtcctaaagctttttttttttttttttttttttgtgataagccaaaaggaaggataagacacacacatatgctgagttagggcgctttgctcactcaaggttgtggtgttgcatcttcatctggttcatgctgatagtgtgcagaattttttttcagaaatgttttatggttatttcctaggaatagcattcagagtacaacattattctttattaacaactgtagtacctacttcacagcatgaaatagttacaaggagtaactgattaaacaggtattaattgctgagaacaatgcctagtggtggtggtgaggtggagctatttacaagacaaagagaaagggaattttgtagagccttttcttgagtcacaaaaggctttttgtcaccttgtactctttggttttccattattgaaacttcacgagttttatccttccaatctagtctttatcgaagacaaactgaacttcaagacaaaagtgaattttcagatgtggacaagctagcttttaaggataatgaggagtttgaatcatcttttgaatgtaagttcaaatataaataccagtttttatatgttgaaaatctagaaagcttagttttggtgaaacgtatccattggtttaaaaagaaaagcagttacaaattgggtcattattattttgtgatacaaccacaagtacagatgtatcacctcatttttctaccatgatgattttcatgtgtgtgtttactttttaaaaatttcagtatgactaataatttcagagtttgagctaagcttataaatgaattattaacttatcagattttaaataagtgatttttatttattttttcctttgatggaatacaagaatgtttatttttatttttttgagatggagtctctctctgttgcccaggctggagtacagtggtccgatcttggctcactgcaatctccctcctcctcccaggtccaagtgattcatctgcctcagcctcccgagtagctgggaccaaccacaggtgcatgccatcacacccagctagtttttttgtatttttagtagagatggggtttcaccatattggccaggctggtcttgagctcctgacctcaagtgatccgcctgcatcggcctcccaaaatgctgggataacaggcatgagccactgcgcccggcctaaggatgttattttttaaatatactgattcagttgattgcctcagatttagaaaacctcatttttagtaaaagaatagagataaaagaatattaagagtccagaaactggtgtcctggctatggccctgccttagactgtcttactttgtagccactttgtaagtgtaaaataagcatgtagagcctatcatctctaaggttctttccagcttgagaaatctttatatttgcatataagctattggttagccttgtaaacttcatcttcaaatctgaaagtgttaatattttgaacagttaaatgagagggcttggtaaattttgtaaatatttgttaaagtctttgtgttaaatcattgatattttaatagaattcaaatgatgatcagcaagccaattgaattcttcactgtcactgggttgattttcctgttgggtaacgaatctcattttgtaaacaaagttaattctttcaactacgagaacactctgacaagcaaatacgttgccaagtggttatgttgggaacttcatagaatcctgttaggaaagggcgcacccagttactttggcttcagttcccgtgctccagtcagttgcccccacactgcactgcccttctttgtcttggtgttattattaaggactcatgggacaattgtgcctcatgcagctgcagggaacatgccaaggcagttggaaatgggcgggctttctcctgccggggatatgtctcatgtggacgctgctgcagctgctgtgcccctctcatatcagcacccaagtaagttctttttttgaactaacagtcagcagggtcgcatactaaataccagtccgtgtgctctgtgaattatttcatgtatcactgaagtcatcttgtaggtgtaaattagtcaaaatcttgggttgggggttataggtgtcattatattgttaatgacatttctgaagtaattcccatgtgaacatgtaaagacagtgctgagaaaggacacgttggaaggaaaggcttctcatttaggcttcccaggccagttgcttaaaaagtgttttcatttactcttcagtgcctggcatagtagttggacttttccccaagactcttctgcaaaaactgttccttgggaaccttaaagtttgggaaatcacagtgaaaaattgaaataataattaactcccagcatatatctttaatatgattgtaacatttaaatattatttatttttctatctacttgtttcctttgtgtcttaagaaattaggacagaaaaacttcgtatttcaatctttggaaaagctgtgacaccgagttagcgtagcactggaggaaaactggccatcagacttctcttctctggcccacttcctctttttcctcttctcctccagattacccacttccctccctgcgggtggagggagacgggaagagagccgtgggagctttgtgctttgttccagggctcagccaacagccaggtccttttcttcttggaccaagtgtttaatcctcaaatctgaaaggaattttctcaagtaaagccacctcttagtccctcccaaacgttggaaaaacatcatacccaaaacccctgttagcagtttcttggttttagtcatggtacccaggaacatataaaataactgaaagaggcaagagattttgagagggttgatgttgctgattccagagtaaatctgctttggaaagcattcagtgagacatgatctagagccttgtctctgctgggcactttgctcagcgctgagcatatagctcaagccctcgccttcctggatttctagcaggggaggcagatggtcagcaggccatcacccaggaccgcagcagggaggggctgcagcagctgagtaggggccgtggccacaagagggagtgtctacaggcactcatttggcacagacctgagcgagggaatacaaataatgtgataggataagggaaatcaactgagtaactaggtgttctgctgctgagatggaacatagattataatatttgctttaaaaattattaagcagcatggcgagtgacattttagttattgagaaattgttatatttgtcatttcatctcttcatctgggcacaaagggaattcaaaaaggttgaaatttggtgtctcggaggtgccccgtggacatgcttccttcctttccccttgtgtccaagagatttctgtataccaccctgcagctacaaaatatacaccagagtagagaagcagctcactcttcctctttattttgtaattggtgcttaaacaacattcctattttgagattactattccatataagaaagcaatcttgtttaggagtaactattttttcttctctagcaaggaggaagttgcatttctgcctgtggaaatgatcagctgtctcctctggtattttaatttcatgagaaggattcagaagagatgggggagagagagaagaaactgtgttgcttctctcctattagtaaaactcagttcctgctgatcactttagaacaaggcacagcaaaaaggttcaaagtcctctgctgaacctatgaatttttctacttattagcattgcttgggttgaaaaaaaaaatgtaggttatgggtcagagccagaagagaaaggtcagcataattgtctctgggattggggtctaattaaaacttttgagatatagggacctgtgccaagatgcagagggaacagacaagtaattaaagtatggaccttgcctggaaggaatagaagtggaagaaacaagtacatgtagtttttgacagatcaggtacaagatatcctgcaagtgagatgctggagtggttagttgtcacttcaggaataaggaggaggtggcatttcagttgggtcttgaatagcatttcagactttgtgagagcaagggagtgctacaggctgaggagacagtgaaggtgaatgtcaagcaaggaagatagagccacggccaggccccagtgagtgggttggtacagatgaaatatttctcgtacaaagttggtggtgatgtaggaaatcaatctgggaagaaaagggcaggttgtcagagcccagactaccatggcgtaggactcttatcagagcggagatgctgcacagcagatccacatcttcccctcaggaaatgcctggtgcagatgaccacaggttgttggaaggcagagactggcttcaggaagagccttgactgggctgtttcagtagtccagggagatggtgagaagggcccctgttgcagccacaggacagggagtgtgaacctgcaaacactggtggctgagtggatagagggtagaaagagcatgatcgaaggaccgggatgatcatgcctgggacgaagctagtgctgtggggtttccacatgcggatggcaaggaactatcagaaatgtggacgcgaggctagggagagagaccaggagtagaggaaaagatagggaaaggatccatatacaagtgatggctaaaaccccaggaagggctgccgtcagtttggaggaagtggggaatgaacagtgagatggctggaatggcggggggagggcagtggtgtgatttctgttctgttttgttggggtaggacagacttgagcatctttatgggagtaagacttctaaaactactgtgtacagaaatagggattaatggctcagtctgggtcctaaagataggggagggattataatcaaaggcagaggcagaaatgcagggtttgccttggaaaggagggaggagatctgtgaagaggatgagaacatgtgacatggaaggaggacagttggagttggttatggtgagggtgacgtatttgtctcagtcaagtgaagtagggtacagttcaaggagtggggtcgggagcttgaagtcggtgaaaatgaaatagtgacttgaagcaggtcacagagtcaactaaaagccaagcagagtctccgtgggtcttggcaagggctcctgcagactggtcctgcattcatttgaataatctgatactggaagctactctttattttctgtcctattaggtgtagatcagaaacaaattgaagaacaaaaggaagaagaaaaaatacgggaacagcaagtgaaagaacgaaggcagagagaagaaagaaggcagagtaacctacaagaagttttagaaagggaacgaagagaactagaaaaactgtatcaggaaagggtaataagtatgacttgattctctgaactggttgctccattgtacacctttcgtaagtacattgagctcagggaggggagtcaattggtgtacaaagtcagaggtgcggcagatgccttaaaaggcatccctgtcctctccttgtcttaaaagcagtgggaaaggctgcacagaatgtgaagcttaggagttttgtagtaaaggatagtttttgaaggtaatttttgtacattctcatctgatccttaaaacaagcctgtaaaaaaggtagactgtgctttgctgcagaactttgctttgaaaacagggtttaaagaagagactgtcagtgccagctagctgggactagaacccaagggaggagtggctgccagttcacagttgcttccaggggcacacactccctccctccttcctctatttctcttcttgccttctgtgtcccaattctagtcctagcagatggattactctgtccacttaacacacctgctaagtcttgcttgaattactctaacatatgaatgttccttggactcttggttaattcaagtccaaagcacaggacacttgccaattaataccttccttcattgagatgacatatttgtcttcctttgatgatagcaatgacttcaattttaaaaattagtcctctggcatacaggctgtacttgaaggatcgggattaatattagtgcatttttaaaacacttaaaagttttacaaatgtatttgtgtattttctgttttggtgcctgttttatagaagatgattgaagaatcactgaagattaaaataaaaaaggaattagaaatggaaaatgaattagaaatgagtaatcaagaaataaaagacaaatctgctcacagtgaaaatcctttagagaaatacatgaaaatcatccagcaggagcaagaccaggagtcggcagataaggtgccagtgccatgggcagggcaatctgtgggtgggggacatccagggcttccgtggcttaacttcttgggacgggaatccgtcttctccattgaagacaaaaaggtgaaaagtatagaaaatccaaagttcaaatggaaccttgagtcttttaaatatactattcttttgacaaaaattcatagcttttttgcttaaggtaaaagatttaagagattttaatttgtaaaagttggggtggctcattaagaaagaaaagatctatcaaatgcattaatactgacattaatattttatgtaagtctgaagtattatgggtgttaaatgcataccctatagtttattttgatgtgcttgctaaatttcatgtttaaaagtcacctcttttttagacttttaaattacatatatatttcaaaaatggttcttaaagtatttcatgaaattaatgcatatctaatttcaaaattttccaccctctccatgtaatcagagctcaaaaaagatggtccaagaaggctccctagtggacacgctgcaatctagtgacaaagtcgaaaggtacctgttttccctacacactttcatacacaaactgttaattgcttattttgtcagccaagagaaacagatgtttgagattgcctgtaagaagttattgaatcagtcaaaattagtgactataaaaacaattgagttttttgacttgtgaaattgatcctgatataaattgtaaactagggcagaaaccccccagggaaggaattgagaacattatgaagatagcaaataaacttgacacaaatttttacattttaatttttatctttccctaatttagtttaacaggcttttctcatgaagaactagacgactcttggtaaccatgtttgctgcccagcttctaacttacataccgtgagaagttacgtaacatttactcctttgtaaatgtttccctatcatcagacaaaactcaataaaaatgtgtgtaatccaatgtgggtttttttttccataattaattttgataccatagtgtgtgaaccaagaataatctagtcacgtgaaacctcttctccagtcatagtatttctcattcattataataaaagtaactggcttttaacctcctta

SEQ ID NO: 6 - protein, 1012 aa, Homo sapiens
MMAQSNMFTVADVLSQDELRKKLYQTFKDRGILDTLKTQLRNQLIHELMHPVLSGELQPRSISVEGSSLLIGASNSLVADHLQRCGYEYSLSVFFPESGLAKEKVFTMQDLLQLIKINPTSSLYKSLVSGSDKENQKGFLMHFLKELAEYHQAKESCNMETQTSSTFNRDSLAEKLQLIDDQFADAYPQRIKFESLEIKLNEYKREIEEQLRAEMCQKLKFFKDTEIAKIKMEAKKKYEKELTMFQNDFEKACQAKSEALVLREKSTLERIHKHQEIETKEIYAQRQLLLKDMDLLRGREAELKQRVEAFELNQKLQEEKHKSITEALRRQEQNIKSFEETYDRKLKNELLKYQLELKDDYIIRTNRLIEDERKNKEKAVHLQEELIAINSKKEELNQSVNRVKELELELESVKAQSLAITKQNHMLNEKVKEMSDYSLLKEEKLELLAQNKLLKQQLEESRNENLRLLNRLAQPAPELAVFQKELRKAEKAIVVEHEEFESCRQALHKQLQDEIEHSAQLKAQILGYKASVKSLTTQVADLKLQLKQTQTALENEVYCNPKQSVIDRSVNGLINGNVVPCNGEISGDFLNNPFKQENVLARMVASRITNYPTAWVEGSSPDSDLEFVANTKARVKELQQEAERLEKAFRSYHRRVIKNSAKSPLAAKSPPSLHLLEAFKNITSSSPERHIFGEDRVVSEQPQVGTLEERNDVVEALTGSAASRLRGGTSSRRLSSTPLPKAKRSLESEMYLEGLGRSHIASPSPCPDRMPLPSPTESRHSLSIPPVSSPPEQKVGLYRRQTELQDKSEFSDVDKLAFKDNEEFESSFESAGNMPRQLEMGGLSPAGDMSHVDAAAAAVPLSYQHPSVDQKQIEEQKEEEKIREQQVKERRQREERRQSNLQEVLERERRELEKLYQERKMIEESLKIKIKKELEMENELEMSNQEIKDKSAHSENPLEKYMKIIQQEQDQESADKSSKKMVQEGSLVDTLQSSDKVESLTGFSHEELDDSW

SEQ ID NO: 7 - DNA, 86265 bp, Homo sapiens
ctggcagtggctgcctttagggcggagccggctcccgctctcctcagtctgcggtgggctagcggacggtccggcttccggcggccgtttctgtctcttgctggctgtctcgctgagtcgcggccgccttctcatcgctcctggaaggtcccgagcgcgacaccatgtcggagcccgggggcggcggcggcgaggacggctcggccggattggaagtgtcggccgtgcagaatgtggcggacgtgtcggtgctgcagaagcacctgcgcaagctggtgccgctgctgctggaggacggcggcgaggcgccggccgcgctggaggcggcgctggaggagaagagcgccctggagcagatgcgcaagttcctttcggacccgcaggtccacacggtgctggtggagcgctccacgctcaaaggtgcggggccgcggagggcagggtcgccagagccaggcctcgcggaatgcagggcctgccaggtcctccggggtcgcagatgtccccgggatgggaggagcccggcagctgcagatgacccctggatgggcagagcccggcggccgcagacgtcccgccggccgggtccccagggccgcagacgccccgcagaggccggcgcggcgcccggggctcgccctcgccacacccactgcccggcccggagcccccagggcgccccgctcctggtcgcggggaggggaaaggggtccccgtctgccgtcacccaaaacaatggggtcgctttgtctgctcgggcctctcaagatggccgagttgggtggagacagcgtctccctgggctgagagcgggcgaggccgcatccctgcctccagtgtcacatgagcttttcggtttcgatttgtgtccaagccaagtggccttcgggagggatgtgtcgggggcagacccgcggagctgggggcagccggggttctggttcgggaggaggtcgggcgggtgtcccagccctgccttgtggggacccagaggccgaggcccacagagcgacggtgccagccccgggcctgcgagcatcactgttgtaggtggatgctctcacagcatccttgctgaacgggtgtatcctgattttacacctgaggaaactgaggctcaggttaagtgatttcacccaaggtcaccagctaatcttagtcctgagactagactcagtgtctcagctccccatccactgcttgttttcactgatcatacctcatatttgtttaatgcttcgatgatgttaatgataaccctgtaatatttgagtctaattttacagattaaaaaaaaaaaaaaagattcaggttaggcacctagtagggggaagaggctagagttagcgtgttccagctgtctcctcaaataatgatcgcccaccagcaaggttacattcatctaagtctggggcttgcctgcaggcaggctttctcatggattcattacaaccactttgtagcccattacaaccactttgggtgtggcgtgtccatctaagaacctaaggatgatgtccaaggttagcctctagggattggagattgtctaaaaatatttgccaacaagcttcttaaaatttcaaaaaactgtatggttctctcagtgagagaccctgtactgtctgccccatccttaacacacactgtgtttctgatggtttgtttctttcaaaggctattcttactcagaagatgcttccctgtagccttggtttcctgccagagattagcagggtgtaaaagaatatttttttcttatatccacgtggaatgttcaaggcaaataaaccatttgagcatatttagagtattaatgtttttgagggttgtttactgtgatgtttgggattatgtattcctaagtggaagccacaaaagttaaaaaaaaaaaatttatctactcttttttttttccaaaaaacatatagtcattgtagaaaatgtactatacagctaaagtaaaaatcactgggaattgtttgacccagatataatcactgtcagcatttttggtttatgtctttgtggtcatttttcaatgcatattcgtcattttattaaaatacattttaatctgcatttttaaagttaattgtattttgagtagcttgaccattgctaatccttgatatttttattgcatagtttatgtattagaatcagtgattttattttttttaccttgtgtcactctttttatgaaaaaaaatttaagttttatactttgcttctagagtgatcaccagtaattcgctttttccaggcatcttaaaattggacgttgctaaaattattggggtggggggactatgtttatgtagtacaatatctactacaaattctctctgttgtcttatgagtacctttttttctttcagcaaaacaaatatgcaggtatccaaatcttggctccataatgacttgcacttttgaaagttgactaaggaatgagactatctaaaattgaaatcctacctcatttctgtatttataacaatccttgaagtatttctaccaattcaacctgtctataatttatttttcacttacaaaaacctaaggaaagatttttaaattaatccagttttatgatagatggtctgtttgtcttattagcagcctggctacactaggacaccttagatataagtagagacccaggacttttggtaggagggctttcttcttggtggcttttatgagttagctttggcatttgtacatttaatcaaatatgtgcatccagtagttaattacagtgaaaagataggcatgcattaatgtagacaacagagctgaattatttaaactgaataaagatcaccaacaatgaagtcatgtaatttaatgaacagtagaaattacttttatttattttattccttccactttttttgtggaagtatccaaacacttgtaattgaatatagaaacatttttatgtgaaactatatatattttttatttgtttgtttgttttagctaccccagctagccataaacttttgttgttaaagtgcagcattgagctgggtgcggtggctcacacctgtaatcccagcactttgggagaccaaggcaggaggatcacttgaggccaggagttcaagaccagcctgggcaacatagcaagaccctatctctacagaaaattaaaaaataagccaggcatggtggtgtatgccagtagttccagctacttgagaaaattgcttgagcccaggagtttgacgctgtggtgaactaggatcacaccactttgctccagcctgggtacagagtgagaccctatctctaaaataaatcaagtacagcattactcaaagtatagaataaatgttgtgaatttaacaactcatcttgatactgaggaattggagagtttgtgggaaaaagggattaagttatagctcctcattttaaaaagagaaacctttgtatagttcctggcctgtaggaaattgtcttcctcatagtatgcttacagcatggtgacaaaataggtgctcattacttaactagccattttatgttaatgacgtttttgtagcattttttacttcaaggaccattttttggttgtgtatctccgttcggtggggtatgcttcagtttgcagctgatggaactgacatttccatgacttgtctgctctgcagcttgttcatgacctgcctgggattggctgctaggttggttggtctggatgagagcgtgtagtttgggttttttgtttgtttttggtggggaaagggttttgttttgttttgttttgtttgagacagggtctcaactgtgtcacccaggcaggagtgcagtggcccagtcatggctcattgccacctcggcctcctgggctcccagttcattttctcatttttttaatagagaggaggtctcaccatgttgcccaggctggtctgggacttcagggctcaagcaatacttccacctccgcctgccaaagtgctgggattacaggtgtgagctaccacaccccacgtgtttgtttgtttaacactccagtgtttgagacttggaattttttttttgagacagggtctcactgttgtccaggttggagtgcagtggcacaatctctgctcaccgcatcctcaacctccggtctcaagcgatccacccatctcagcctcctgagtagctgggattacaggcacacaccaccacgcctggctcattgttgtattttttgtagaggcagggtctccccatgttgcccaggctggtcttgaactcttggacacaagtgatcctgctacctcagcctcccaaagtgccaggattacaggcgtgcgccatgacatccagcctgaggatttaattctaaaggatgaagaaatgtagtttaatcaatgtaattaatctccaacacaacatatcaccatgatttcgtgcatttagaggagaaatgttttctggttaagtggaaaattgtactattggcttctgcaagaccttctttctttctttttttctttttttttgagacagagtctcgccctgtctcccaggctggagtgcagtggcacgatctcagctcactgaaagctccgcctcccgggttcacgccattctcctgcctgagcctcccaagtagctgggactacaggcgcctgccaccacacctggttaatttttttttttttttttagtagagacggggtttcaccgtgttagccaggatgatctcgatctcctgacctcgtgatccacccgccttggcctcccaaagtgctgcgattacaggcgtgagccaccgtgcctggccaagaccttctttctaaagcagctttatagtgaaacattttatttagaaatctggaccttctttcttcagtttactgtaatccacattcactgagtagaatttgtattgatccctgtgacctagtttcttctagggcacccagttattctttctgtccctagtaaaatctggattgaactgtgccagatgcaggccgtacagtgttgctccagtacctccagctccagcagacacaaagagggagatcagactcagatgcttcttggcctgacggaagatctggcagcgcgtgtttgtaccaggggcctccagttcaaaaggagaaaacaaacctagctaccaggctctgcactcagtggtatccgcacttcagcgaggctgttaactgccccatgctgtcacactgtgggacacaccatctgcagcaagataaatttgaatgtgcagtgtagcatagtaaacgaaatttatgtacagcaaagggaaaacagttatcacttctttttaaaaactaaacatggatgaaaattgcgtgtcagcatcggagcatgtcagattgggagcagcaagagagatttagcccagccctcatctttcatgaatgaggaaaccaaaaccctaggattttaagacccagttgggaaaaggatgttctaaggagggttctgaaacctaaaaactcatctctgcagtgccttggtatctgttatttattttgagttagtagtaacttgaaaagtaccaagtcttaagttcctttagtgttaataacttagtagatttttaaaaattctttctcttttcttttcgggaaataccaaaatgagctccagtttacgttaaatataagtattatatggggtttcatgctctcttcatattcctaatgatgttacaatggaaatcttcaggtggaggagaatactccgactttctcaccgtgttctgagccttgtaccagagcagggagtggttgtgggaaagaagtcatggcccctcaggaggatgaaagggtggacatgcaggtgacaagagaaagcgccagagacaagaaaggggaaaactaaagcgggaaaaaaagggaggccgtgtataatagtgattgaccaccagaataataataatgtggtattagtatgtttggtttgttgttgtttttttttttttttttttttttttttgagatggcgtcttgctctgtcacccaggctggagtgcagtggcacgatctccgctcactgcaacccccgcctcctgggttcaagtgattctcctgtctcagcctcctaagtagctgggattacaggcatgtgccaccacgtctagctaatttttgtatttttagtagagatggggtttcaccatgttggccaggctggtctcaaactcctgacctcaggtgatccgcccgcctcagcctcccaaagtgctgggactgcaggcgtgagccactgtgcccagcccatgtttgggattttaaaagggaaagaagacaaaagataaagagaaccccaggaacatttaacacgtaatttggtagtgtatgcgggccaaaggagatgaatggctttgagaccaggaagagacttgctgtatggctgggagaaagtttggaaggaagagtacatgagggaatgagcaagggtgcaggagttgggcagcctcacctggcactttaccagtgtgctttgtcccttttccaactgcccgttcaccagactttgagagggcatgccctgtctactcaggagagggccgtatcattcttttttttttttttttttttttttttttttgaggcagggtcttgctctgtcgcccaggctggagtgcagcgctgcagtctcagctcactgcagcctcggtctcctgggctcaagagatcctcccgccacagacatgcaccaccacgctctgctaatttttgtattttttgtagagattgggtttcaccatcttgcccagactggtctcaaactcctgagctcgagtgatccacccaccttggcccctcaaagtactgggattacaggcatgagccactgggcccagtcgagggtggtatagtttttaaggtaattgaaattgcatagtttttgtattccattaaacaagccataatgctggctgggtgcagtggctcacgcctgtaatcccaacactttgggaggctgaggcaggcagatcacttgagctcaggagttcaagaccagcctgggcaacatggagaaaccttgtctctacaaaaatacaaaagttagccaggcatggtgatgcacaactgtatcccagctactcaggaggctgaggtaggagaatcacttgagcccagagaggtcaaggctgcaatgagctgtgattgcaccactgcactccagcctgggtgacagagtgagatcctgtctcaaaaaaaataaaacagatgtaatgcttacctaattcatagtttaatgatacaaattactagtagtttgaaatacattaaactagtctttgaataaaagtatacacacgttagtgctaaatgccattttgaacatctctagaaattcaataaactctcaaaagttaaccaaggaagtgttcacaagttgttgtaatgtgtgtcagtatagcttgcagggaaggaactcatgaagcaggcccagtactttgattctttgaatgcatggacatatagtacagtattggtctgttacattttaacagtaactttgtattaactagtaactttgccaagcataaggaaatggattcaaattttactgaaagtggtattacttaatcaaacgtgcagattgtgtttgtagtaagcttataaatataacagggctaatagcctctttgttattaagaattaataatcaagtgtccttcctcctctggacaactatttaaaaaaaaaaaaaagaaagaaaagtagaatgtcagattattatttgatggcagtttttgaaacagtgtcctaaattgtgtgactgtaaatgggagtcagacatactcaactgtgtttgatccgtgtctttatagggaatatgcacagaaagactagtccaagatgttttctgtgactggttcgtagtgacttccataagttattatcaagagaagttagaatttagcaaagcagcagggaatatctatttgcattatcgttgtttgaggattatgtcattgggtgtgccttcctgagctgaagcagcattctactgcattgcagtattcccagggcagagctggagcgctcaccacacagcggtgactcatctcttggaatggcacctagttcccctaacccggtttgcattaggaagtgtaggccacatgctcatatgctgtgtccggactgcgcaatttctgtgtgattttatttgtatcaatgatgactctttatggggggtagaaatgattcagagttaacaagccatatttttagttgcgtcagtgatttcctttgatcattatagaatgttaattttattttctgtatattgtttcggtgttattttgatggcatattttatataaatggtagaacaatatggaaaattcagaaaattgagggagaaaatcatcgcagtactttgacagctgtttcagtttggagatagttctttattctctatgcttacattttacaggttgtaatcgtgtgtggctgctttcaggcagtgtgatttctcttgtggtctagctacatttgagtggttagaaaaattggttgctttctttagtttttttaatagtcgttttaaaaaatagcaagtatctggcatactagaatgttctgccgcctactccttcctcttcctaaaattatatccaaatatacccaaaacaataatttggaagaattattgtctctcgatagatacactaattttttttttttttttgagatcaatctcagctcactgcaacctccacctcccaggttgaagcaattctcttaccccaacctcccaaataactgaaattacaggtgccaaccaccacacccagctaatttttttaatttttagtaggtatagggtttcaccatgttggccaggctggtattgaactcctgacttgaagtgatctgcccgcctcggcctcccaaagtgctgagattacaggcatgagccaccgcgcctggccagatagactaatattttatactctttagtgtgaattttgtatttgtctcatcttaaaactaaggaagcaggggttgggcgcaatgactcatgcctgtagtgccaggccgaggcatgaggatctcttgagccccaggagtttgacaccagcctgagcaacatagagagaccccatctctaaaaaatgttttaaaaatccactgaaggtggtggcatgagcgtggggtcccagctctttgggaggctgaggcaggaggatctcttgaacccagaagatcaagactacagtgaggtgtgatgaagccactgcgttccagcctgggcggcagagcaagacattgtctctaaataaataaattaattaattaaaataaaatgcttacagaaggagcaagatttttaaaacaatagctaaggaagcaaatagcttttgctcagaccctgtgtatccaggtttcatagtttttagtgcttaatgaaaccttataaccacctaactcaatattctactgcctgctccaccacccattttacaccttacaaatttgaagcccagagaaagaaaaatgactttctcaaggtcacatatcttctaagcaatagaacttgaactgttgaaactactgccctttcctttatttatttatttattttttttgagatggagtttcactcttgttgcccaggctggagtgcaatggcgtgatctcaactcaccacaacctccgcctcctgggttcaagcgattcgcctgcctcagcttcccgagtagctggaattacaggcatgcgccaccatgcctggctaattttgtatttttagcagagacggggtttctccttgtttgtcaggctggtctcgaactctctacctcaggtgatccacctgccttggcctcccaaagtgctgggattgcaggcatgcgccatcacgcccagccttccctttctattacatcatgacttttaaaaggtgaactatgtataaaataatcatgttaaattaatccatagattgtaatttttgccaacatatatttcatacagtacgttattgcaaagataatttgactagaatgtttaggcattgcatggattagtactagatgtagaggtttagattattttctattcttatactttttttagttcttcaatcttgatttttaatttagaaatttggttcacatgcttcttgaggctaccttactattaatttccagtaagcttttttaaacttaaattttattattaaaaaattgagacatggtttcaccatgttgcccagactagtctcatactcctgagctgaagtggtccacacctcagcctcccaaagtgctgggattactgacgtaagccaccagcccggcctccgtaagcttttgaaagtgactactgtgtgcatgttgtattgcgtggaatctagcgtggtctctgccttccaagagctcacagccggggaggaagatacattcataagtcaaacccagaacagactcagataagtggtgtggcgcagcagagggcaaggctagacgaatgcttctcagtgacccttgggatgtttcttgatacttttcttgattggggtttgtcttgggcctggccttgatgaaaactggccatgctacattgtggtgaggagcctggacttcggaatcacaaacttctgaattctcacattgttgcttcccacccaagtatctgtgggcaagttactgatattctttatggagaaaacaaggataataatagtcacaccaaccccatagggttaaatgtatgatagctgtaaagtgcttagtaaaatgcctatcacacaggtgttgctgagtgaacggctgagcagaatattcttgagagcaggggtggaaagtgacttctgtgtttgaagcacaatgaatgagcttcctgggatgggatgctgagaacttggccatagccagcagcggctagcactgcccaccgccaggccctgttccagtgctttcatgcaccaactcagttatccttgcagaagccctggcatgctcacgctaccccacttcacagacaaccgccttgcccaaagtcacacagcaaagtcaggagtgaggaaaaaaacggataggaagggaaaaatagtgccaagtcatgtaggtgtcgatatgtcaggctgggagtagggagaaaatagtcattgtctaagcagttgataaataagaaattggaaatgttgatattaatttgatatatttattatgatttgtagaggacgtcggtgatgaaggagaagaagaaaaagaattcatttcctataacatcaacatagacattcattatggggttaaatccaataggtgagtagtacaaatattaccattatctcaggttataaatttgtgagaattaatatgaatcttttttcttttcaaactcagaaattcttactaagagaattaatataaatcttttttttttttttgagacggagtttcgctcttgttgcccaggctggagtacaatggcgcgatctcggctcactgcaccctctgcctcccgggttcaagcaattctcctgcctcagccttccaggtagctgggattgcagacatgcaccgccacgcctggctaattctgtatttttagtagagacagggtttctccgtgttggtcaggctggtctcgaactcctgacctcaggagatccacccgcctcagcctcccaaagtgctaggattacagacgtgagccaccgtgcccagcctaaaattaatatcaatcttaattgactcagacaaacacattaagaaaacactcaagcccggcacggtggctcacgcctgtaatcccagcactttgggaggctgaggtgggcagatcacgtgaagttgggagtttgagaccaccctgaccaacatggagaaaccctgtctctactaaaaatacaaaattagccaggcgtggtggtgcatgcctgtaatcccagctacttgggaggctgaggcagttgaatagcttgaacccgggaggcagaggttgcagtgagccgagattgtgccattgcactccagccttggcaacaagagcgaaactctgtctcaaaaaagaaaaaaaaaaaaggaaaagaaaacgctcaaaagatttctggtctttaaattcagtgtctttgatttcatgtcttcaaattaggaagttttccaattcaatataaattctaaaatactgtccttttagttgccatatcatggcatctatcttctgtttgagctgtaatatatgtaacatgtctgatgctactctcaggttacagtcagccctcgatatctgtggttccacatctgcagattcaaccaaccacagatagaaaatatttgcgggaaaaaagcaatacatacaatacaaaaataacaaagaaagcaagtaaaaaacagccagtataacaactatttatgtattgtttatgttgtgttagggattataagtaatctggagattatttaaagtatgctggaggatgtgcataggttatatgcaaatactgtgccattttatataagcaagttaacgtttgcggattttggtgttccaggggagtcctggaatcaatttcccacagataccaagggacaactggatatctgatttttcattattacagataactagtaaacattctatatgcaggtttgattctttttaggataaattctaaagatagcattactagttcacatgcaaaacatcattaaaatttttaatgcatgttaccagattttccacttttcagaaagattgtgctaatttatcctagtagacatatccaaatttaaatatgtaaatgtcataatggattccgcatttttttaagcttattttgagtaatctcaggttacggaagagttgcgtgaatagtatatagaactcccagatatcagttgttaatgtttgccacttttgcattatcatttttcccctgaatcatttgacagttagttatagacaatatgctcctttatccctaaatacttgtgtgtatttcctaagaacaaggacattctcattcgtagcctcagtacaatgatcaaattcaagaagtgtaagattgctgcagtattgttctctaattatagtacatgttgaaattgtctcaatgatgtcccttatactaattttcccctaattcagagtccagtccagaatcacactttggtttcttgtcactctaaattcctttaatctggagtagtacttcagcctttgtgtaccttttgtgacactgacttgtttgacatttgcacaccaatagcttcatggaactgttgggtttgcctgatgtttagattcaggttatacgattttggcagaaatactattgtgacttcattctttctcaatgtgttacatcagaaagtttcattgactttacagttatatgaagttttttgggttgtttgtttattttgagatggagtctcactctgccgtccaagctggagtgcagtggggcaatcttagctcactgcagcctctgcctcccaggctcaagcgatcctcctgcctcagcctcctgaatagttgggattacaggcacctgccaccacacctggctaatttttttttctttcttcttgagacgaagtctcgctctgtcgcccagtctggagtgcagtggtgcgatctcggctcactgcaacctctgcctcctggactcaagtgattctccatcaacctcccgagtagctgtgattacaggcatgtgccaccatgcccagctaattcttgtatttttagtagagatggggttttgaagtttttgaataactttttgaagttatccgcctgcctcggcctcccaaagtgctgggattgcaggtgtgagctactgtgcccggcctaatttttgtatctttagtagagatgtggtttcgccatgttggccaggctggtctcgaactcctgacctcaagggatctactcaccttagcctcccaaagtactgggattacaggcgtgaaccaccatgcctggcgtatgaagtattgtgtataaagtactggcaagggaattagaaaattcaaattttattaattaccttgaaggcattaatttaaccaactttgagtgcctgttgtgtgcaaggtgtggcagtaggtatatagagtagtacacaaagaaataaaacctgcttcctgttcccaagaagcttgtctttgggagaaagattggcagatacataactaattgtaatacttgtcaaaatacaatggaaacatgaagactggagagattgcttctgattaggggaagcccacagaagaggtcacactggaattgagttatgagggttagaatttcagcagatcaatatagatttcttaagcaaaggcacaaagcacgtgatgtgtttagggaatgggacatctggtctaagtggtgtctcagggtgggaaagaggatacatagcaggaggtgaaacaggaaaagctgagtaggaccagactaaggggagcctggaatggcctcttatcaccttaaccagtgagcaacttttgtttacttagtacagtaaataaatgttacacattagtgtaagatcagatttaagtactacttatatttctagggcaggttagttttaggccaatattacgaattcaacccatgtatgagacaagttaactttgcctggtttcatgtttgttcacattctgtaaccataaccttgattcagtagctctcatgtactaaagaaagacaagcagtgcatttcactattagaaaagcaacacttcagtatattcttgtatgatttttaaattaataagcctaattaggagtgtaacttttctaatttcttgttttatttttctttttagcttggcattcattaaacgtactcccgtgattgatgcagataaacccgtgtcttctcagctccgggtccttacactcagtgaagactcgccctacgaaactttgcattctttcattagcaatgcagtggctcctttttttaagtcctacattagagagtctggcaaggcagacaggtaaaaactgtggtttgaatgttatatttcacttaatgttcacaagatagtatagaactcggtgtaaaacttgggaattgggagggtaacgctagtgagccgaggggatataaaccctgtgtattaataaatatgtgtgtcattactatttgacagacctgaaatgatgggatctctttggagaccaatagcacactaaatgttgaggtatgaaatctgtttttagggatggtgataaaatggctccttcagttgaaaagaagattgcagaactcgaaatgggactccttcacttgcagcaaaatattgaaattccggagatcagcctgccgattcatccaatgatcacaaatgttgcaaaacagtgttatgagcgtggagaaaagccaaaagttacagactttggtgataaggttgaagacccaacatttcttaatcagttacaatctggagttaaccgctggatccgagaaattcaaaaagtaagagcacaggattgaaagttatgtaaaatatgttactctttaatatctttgggaaaactgatctggattttgtaagtgaggtaaattatgtgataacttgttagtggtgccgcctcttggtcctgggactgtccagtgcaggactagccttggtctgggtggaatggtcaggggacagtgtgagattgcttgagtagtcaccctgatagagcattaatctcagcagtcgtatacctttgatttcaaatcaagccacttttgatttacagggaaggaaatctacttgaaatataaaaattgagttgtaatgcatgtgttttgttaacgatatctattctaccttgtttaaatagtgaatacccttgggtgttattttattttcaaaggtgaccaaactggatcgagatcctgcatcaggaactgccttacaggaaattagtttttggctaaacttggaacgtgcgttataccgcatccaggagaaacgggagagcccggaagttctcctgactctggatatcttgaaacatggcaagcgcttccatgccaccgtcagttttgacactgacacaggtaacaactagaactaataatctgatcagtaagttattgatctggcttttacgagatcttacttgataatttaaatgaaaactatagttttcacagatgtactgtcgtttttaaccatttcctttcttacatcacatcttatctttccctcagttccaagtaatgaaaattattctcctacacacttagctttcccctttcccttcaggggatttaagaacatgaaacagtctctaggtatgagcacagattccttcttgtttccccactgctgggctccatgagtcatctccacgagtcggctgtacaattggcacaaagtcaggtatgcttttgacaggccaggcaagaaggtggtttaagtgaagcagttctatttgcccagagggttgtggaaaaagaactggtcagtaccactttctcttcctctttttacttgcccctttctcttctttgtcttcctccctattctgacaagtggccaaaatgaatttagttttctgagtggagaacagtgccagtgatgttgttttttgttttgttttgttttgtttttttctttttaaaatttttaaaatttattttttttaagagatgggatctcactttgtttcccaggctggaatgtggtggcataatcatagctcactgctgcctggagttcccaggctcaagccatcctctcacctcagccacccaagtagctgggactacagggatgtaccaccatgtccaactaatttttgaatttttgtagaaatggggacttgccacgttgcccatgctggtatcaaactcctagtctcaagcaatcctcctgccttggcctcccaaagtgctaggattacaggtgtgagctaccactcacagtcattattacaattatttttaaattcttttaaaaactttgtaacttgactgagctgcattagcacgtactaggtctacaatgtttgaacacgaggcattattaggcatttctgttcaactctgtgctcacaaaagacatgttagaacaagtaattaagacaatagcagttgtcatgttctcacttcccccaaaaaacgtatggtacccacatcttaaatgttagagaaaattgtaagtagaaaccttccggttacttagatcacattgcacacattacatgcgcattcactatgctgaaatgtatactttgatttttttaacacctctgaaacttttgtttttttcctaatactttttttgatcttatgccaaagaaagtcaataaatagattaggatccaagcactttcgtgattccatgtccttagttagtaatatgttcacctaaattaagccatgaatgtaaaacttaaattttaatgttttcaaggataaaattttagttcttctaaacttaattgttactaataaacgttaaaataatatagaacaggggtccccaacccccagactggtactggtccgcggcctgttgggaaccaggctgtgcagaaggaggccagcagcggcgagtgagcattactgcctgagctctgcccccgtcacatgagtggcggcattagattctcataggggcgcaaaccctgttgtgaactgcgcacgcgagggatgtagattgtgcactccttatgagaatctaatgcctgatgatctgtccaccatctcccattacatcaccctcagatgggacctcctagttgcaggaaaacaagctcagggctcccacagattctacattatggtgagtatgtaataataataatagaaataggctgggtgcggtggctcacacctgtaatcctagcactttgggaggcctaggcgggcagatcacgaggtcaggagatggagaccatcctggctaacatggtgaaaccccgtgtttgtaaaaatacaaaaaattagccgggcgtggtggcaggcgcctgtagtcccagctgcttgggaggctgaggcaggagaatcgcttgaacctgggaggtggaggttgcagtgagccgagatcaccccactgcactccagcttgggcgacagagcaaaactccgtctcaaaaaaataaaataatagaaataaagtgcacaataaatgtaatgtgctcgaatcacctagaaactacccacccccccaccaccccccaaccatctgtggaaaaatcgtcttccacgaaactggtccctgttgccaaaaatgttgagggccactgatatagaaagcaaagcaaagcatggtaaattctctgaggctgccaccttcagcctttagagtatgtaggaattgactcatactcttaaataagcaaaaatggagcgccactagggttatcctgttaataacgtgttgttttttcaaatatgaatagtttttgtctcgctagatattttgcaacatcaaaatgttccattgtaatggcatattttagtttacttagttttgttactttatgtgaaaaccattaactctttctctgttaatataggtctaaaacaggctttggaaactgtgaatgactacaatcctctgatgaaagatttccctctgaatgatttgctgtctgccacggagctggacaaaataagacaggcgcttgttgccattttcacacatttgagaaagatccgaaacacaaaatatcctattcagagggcactgcgtttggtggaggcaatttcaagagacttgagttctcaattactcaaagtattgggcactaggaaattgatgcatgttgcttatgaagaatttgaaaaagtaagtttgaatatataagacaaccaacctcaagacattgagatgaaaatatgtcttaataataagcctcacttttgaaattatatcctaggttatggtagcatgctttgaagtttttcagacttgggatgatgagtatgagaaacttcaggtattgttgagagacatcgtcaaaagaaaaagggaagaaaatctgaagatggtgtggcgtatcaaccctgcccacaggaagctgcaggcccgccttgaccagatgagaaaatttagacgccagcatgaacagctaagagctgttatcgtcagggtcctgaggccacaggtaagatttgcattctaaaagtttgtgttttgtttttgtttttgttttgttttttgtttggtgttttttttttgttgttgttgttgagatgaagtttcactcttgttgcccaggctggagtgcaatggcatgatcttggctcactgcaacctccgccttctgggttcaagcgattctcctgcctcagcctctcgagtagctgggattacaggtgcctgccaccacgcccggctaattgtttatattttgagtagagacaggcttttaccatgttggccaggctggttttgaactggccttcaagtgttccacctgcctcggcctcccaaagtgccgggattatagacgtgagacagcatgcccagcctgtttttgtttgagacagtctcattctgttacctaggctggagtacagtgaagtgatcttggctcactgcagccttcgcctcccgggctcaagcagtcctcctacctcagcttcctgagtagctgggactataggcgcaccccaccatgcccagctaatttatttgtgtgtgtgtgtgttggcgggagggggctgtagaggaggggtctcaccatgttgcccaggctattctcgaactcctgagctcaaatgatccgcccacctcagcctcccaaagtgctgggattataggcatgagccaccgcgccctgcccgtatgcattgttttaatgtgttttttgaaaacttaactacttctttctgttgtctttaagatctagtgattctgtattgtgtgtgtgtgtgtatatatatatgcgtatatatgtgtgtgtgtgtgtgtgtgtgtgtgtgtgtatatatatatatattatattttttttttttttttttttttgagactgagtctcagtctgtcacccaggctggagtgcagtggcatgatctcaggtcactgcaacctctgcctctggggttcaagcaattctgcctcagcctccgagtagccggaattacaggcgccagccaccacacccagctaatttttgtatttttagtagaaatagggattcaccggccgggcgcggtggctcacgcctgtaatcccagcactttgggatgccgaggcaggcggatcacgaggtcagaagattgagactatcctggctaacacggtgaaaccccatctctactgaaaatacaaaaaaattagctgggcgtggtggcaggtgcctgtagtcccagctactcgggaggctgaggcaggagaatggcgtgaacccaggagacggagcttgcagtgagccgagatcgcgccactgcattccagcctgggcaacagagggaggctccgtctcaaaaaaaaaaaaaaaaaaaaaaaaaggaaaagaaatagggtttcaccatgttggccaggctggtctcgagctcctgaccgcaagtgatccacccgccccggcctcccgaagtgctgggattaccatgcccagcccatccaaatctttagtgttttccatccatttatcccttcctccatcttggaaggaccctagagccagacttcctgggttttaaatcctaattccatcgtttactagctctgtgactggaatgctttatttagtctctttttcagagagtccttctctgtaaaacatggatagtaattacatatgcctgagatttataaaacaattaaatgactaatttctttatatatatttttttctcttctgaatttatctttcattcttcttttttgttttttgagatggagtcttgctgtgtcgcccaggctggagtgcagtggcgtgatcttggctcactgcaacctctgcctcccgggttcaagcgattctcctgtctcaacttcccaagtagctgggaatacaggcatgcaccaccatgcctggcaaattgtttgtatttttagtagagactgggtttcaccatgttggccaggctggtctcgaactcctgacctcatgatccgcctgccttggcctcccaaagtgctgggattacaggtgtgagccactgcacccggcttaaaataaattttaaagccttcgtttggtcagcatttcttgattacatatctttctcctttaggtcacggcagttgcacaacagaatcaaggagaggtccctgaaccccaagatatgaaagtggctgaggttctctttgatgctgcagatgcaaatgccattgaggaagtaaaccttgcttatgagaacgtcaaggaagtggatggactggatgtttccaaagagggcacggaagcctgggaggctgctatgaagaggtacgatgagaggatcgacagagtggagacccggatcaccgctcgccttcgggatcagcttggcacagccaagaatgccaacgagatgtttaggattttctccaggtttaatgcactgtttgtcaggcctcacatccgtggggccattcgcgaataccagacccagctgatccagcgcgtgaaagatgacattgagtctcttcacgacaagttcaaggtccagtacccacagagtcaggcttgtaagatgagtcacgttcgtgacttgccccctgtgtcagggtctatcatctgggctaaacagatcgacaggcagctgacggcctacatgaagcgggtggaagatgtccttggcaagggctgggagaatcacgtggaggggcagaagctgaagcaggatggagacagcttccgcatgaagctcaacacgcaggagatctttgatgactgggcaaggaaggtgcagcagcgcaacctcggtgtctcggggcgcattttcaccatcgaaagtactcgggttcggggccgaactggaaatgtgcttaagctgaaagttaactttcttcctgagattatcacactatccaaagaagtccggaacctcaaatggcttggtttccgcgtcccactggcgattgtgaacaaagcccatcaagcaaaccagctttacccgtttgccatctcactgatcgagagcgttcgtacctatgaacggacctgcgagaaggtggaggagcggaacaccatttcccttttggtggctggcttgaaaaaggaagtgcaggccctgatcgcagaaggcattgcgttggtgtgggagtcctacaaacttgacccatatgtacagcgcttagcagagactgtcttcaacttccaagaaaaggtatgctctcatgtaatcctcaggtgtcctggtaacgaatgaagcacagtaatagcgagctcagttaaaacactagttctcccgaagaaggcatgcatggttgatgcagcatacggccatgtgagctgcaagggaggaggaccctttgtactcaccgggctatttaatggtgctgggttttagggaggccattaagtaacaacctgagtttagaaacaggtggagagctaaaggacacaggagtccaacagagagcagaatgcagttttattgctgctacagctgaaagcagagcaggctctaggtctcagccacgaaggccttacccagagcctgcggctgccagcggaccagatgcatacgacagcgaggctggctccccaggcacaggaggagcttaacagagcacgtttacttccttctcccagatttacccatcagaggccacctctcccattgagtgggagtaagggaagagaagctggggaggctccatgcattttcctttcctctgcaaggacatgcgagtggggattagtgttctcaccccagcagctaggattagctacttatggaagaactgtgcctggagcatttgtcaatgtataatatttgagaagaatgttatgtgagaataaaggaacagagtgtgagtgggtgttttaaatattaaatatttcttccttcaggtggatgatctgctgatcattgaagaaaaaatagacctagaagtccgttccttggaaacttgtatgtatgaccataagacattctcggaaatcttgaacagagtccagaaagcagtggatgacttaaatctgcactcctattccaatttgcccatctgggtcaacaagcttgacatggaggtaagggatagaatttgctagcattttcctcctttttcttctgctgaccctccagtaagcttattagtttgtcactaaaaagcatttttccttggaaattatctgtgatagttcaattcccctccaaaatctcatttaactagtgatagaactgaattgtggccaggcacagtggctcatcatgcctgtaatcccagcattttgagaggccgaggcaggcagatcgcttgagcccagaagtttgagaccagcctgggcaacatggcaagaccctgtctctactataaatacaaaaactagccaggtgtgctgatgagcacctgtagtcccagctactcaggaaactgaggcgggaggatcacttgagcccaggaggcggaggttgcaatgagccaacatcgcaccactgcactctagcagagtgagaccctgtcacacacacacacacaaaaagaaccaaattatgatactacatgtcagtactcacatcaagtttaagttggaagcagggagataagagggaggagaaagtgttgcctttatttgctggatatttgataacttcctatttgtccttccttgctttccttatgattcgtgttaccttttctagccctccaggtgtcctcctctgatgaccctgccactccccaacacccaatttagaaacagccacattctgcccccacccgtatccccgtagacaagtggggatgggtagaaggtgtggtatgtgtgcataaagcacacttaccaatccacgccttttcccactggtggacttcagagagcacaccagtggagagtgttggggaggaggatattttatagcagaggttacaggttgtgaaggattggtgattcagtatccaaagatggagaagacagcctaacaagtgatctgtggctgggagaaagtgagaaagtgagattctgagaagagagatatgaaggcttctagtccggaactgtgtatcttttatctgaaacacctaccactttctgattgacttgctttgtgagctaacttttagaagaaacactgttctctgatataacgttgtctgtagattgaaagaatattgggcgtccgtctgcaagctggcctgagagcttggacgcaggttcttcttggacaagctgaagataaagcagaagttgacatggacacagatgctccacaagttagtcacaagcctggtggagagccaaagatcaaagtgagtgcttctgtggcattctatttactaataagtgaaataacaaaactctctcgttaaaaaacacctatggaaaggtcacttagtgtggacacctggcagatgccaccttaaccaggtgatgaaggtcagcctcaccagtggcgatgtgcaggtgtcatgtgccctctgatgtgatgcgatgggaagggcaggtcacctctgcgctctttctccaaaatccctcactctcatgtgagatgttaacattggagaaagctggtggaggatatgtggaaactccttgtacttcctttgaaactctcctgtaaatctaaaataattattttaagtcctaaaaaatgaaaaattaaattttaggaaaaaaactacactggaaaaaaacttcttaccattcatgcaataaattatttcaagaactgcatgtaatccaccagaagtcagtgttcagaccatgacattgaaacgtactccactgttttaacaaaggtctcagttcacatccccgggaagaaggtggcaacacagtggccaccacacggagtagtagtctgtgcctcccgagccatctctttcgcatttgtgtggagcttagcaagctttctaaacaactgaataattctgtcaactagcactgtgtaagtaggccctatctgctgctattggtggtggttacaaaggaatccaccttacagtaagtgtttatagtatttgtgttatatttaccaataaaaaggactcacaaaacagtaaaaaccttgatctgggagaaacagttggcttttttcccctacctacactttacctttttatttttttcccttacacttgaaaaatgttttcactgttgaatatttctgtttccacctttgaatattactattattggatattcatccccagagcatactttttaaaataccaagtcccagagaagcaaatgagtgtttctaaattgatacaattacagtcatgcactgcaaaatgacatttcagtcaacgacaagaccacatatacaattgtggtcccgacgattacaataccatatttttactgtaccttttctatgccgacatatgtttaaatacacaaatacttaccattgtgttccagttgcctacagtattcagtacagtaacatgctgtacagatttgtagcctgggagcaatcggccatgccacatagcctaggtgggcagcgggctgtcatctagacttgtgtaggtacatgctgtggagtttgcacagtgatagaatcgcctcaccgtgattctcagaacgtatccctgttgttaagcaacacatgactatctagtggagacgaagttggaattcttgttgagtgtaaagcactggcaggtggcacagacttacctgaccttggtcaacctaaatcattgcctgacaactgataacctgagtggtatcactgcttcagtggtgctagtttctcgggtctcaaggtcgttatattgagacatcgtcatatacttaggccaaaccagatgaaagttcattgagtacctgttgtgtgttcaatccctgggcaccagggacccaggagaaggtgaagcagcacctgctgtctgacttatgttcttttggggaaggcacaaatgacaaacatgacattatacaagaccatgtctgataatcaagtgacagacattgtagttcagactgaagtagtttagtaatttagagagagaaagtgttgagtatcaaaactattttattgaggccagacgcagtggcttacccctgtaatcccagcactttgggaggccaaggtgggcagatcgcttgagctctgaagtttgagaccagcctgggcaacatgacgaaaccccatctctataaaaagtacaaaaattaggccgggcgcggtggctcatgcctgtaatcccagcactttgagaggccgaggcaggcagatcacgaggtcaagagatagagaccatcctgtccaacatggtgaaaccccatctctactaaaaatacaaaaattagctgggcgtggtgatacatgcctgtagtcccagctactcgggaggctgagacaggagaatcgcttgaactcgggaggtggagattgcagtgagcggagatggcatcactgcactccagcctggcgacagagtgagactccgtctcaaaaaaaaaaaaaaaaaatacaaaaattaactgggcatgatggtgcacgcctgtggtcccggctacttgaggggctgaggcgggaggattgcctgagcccagaatgtcaagtgagccatgtcgccatcgcactccagcctgggtgacagagtgagaccctatctcaaaaaaacaaaaagcaaaggacttggcatggtggctcacacctgtaatcccagcactttgggaggctgaagcgggtggatcacctgaggtcaggagtttgagaccaacctgaccaacatgctgaaacccgtctctactaaaaatatataattagctgggcttgctggcgcatgcccgtaatcccagctacttgggaggcttagaattgcttgaacccgggaggcggaggttacagtgagccaaggttgtgccattacactgcagcctgggcagtaagagtgaaactctgtcttaaaaaaattttttttattgaaaaatagattgctgagtagaaatgaaacctttctttcacagaatgtcgttcatgagctaagaataaccaatcaggtaatctacttgaatccaccaattgaagagtgcagatacaagctgtatcaggaaatgtttgcctggaagatggttgtactgtctctccccaggatccagagtcagaggtaccaggtaagcctttggtgactcgaggcacacgcctctgaccaggactctcatgggctctgtgataccacttcttcatggtgcttctttagataagctcttgatgttgtttacaaactccagacatcccaggggaaagttagggaggctttttgtgccctgacctttttttccaactagttacttggcatttgtagcttggtctcagtagtttcttcgaactcctgtccatgagcatctttgggaatctcaattcctgcttctccctctcctccccaccccccactttttattaggggaattttaaaacatacacaaaagttgagggaatcaagagccccccaccacacagctttatcaatatgtggacaatgttatttatattttctttcctacctctccacccccaccagattatcttgaagcaaatctcagatataatatactcttagtatatttttagaacaaaaggaaatctcaaaagaccatttagtccccagtgtcacttctgaacagaaccagtggcttcataaaaaaagatggcacaacttctgctattgcagactcttccagaatttagtgataagacattaaccgttttcttaactttgaatataaactcagatctttaaggattttttttgaggtagttaattgcctatggctaaaatcgtggtgatgtttcacctaatgctgggcactgtccagctaatcagaaccaagctatggatattggcttctgcccttcaaggagtctacgtacaatccttagcatcattctcatcatgttactcctgtttttaaccagccgtgtttctatttgcattgttctcttgcttatctccaaatttaacaaactaaagccagcagtctcctttttccctagagcccatcccctcactctcgtttagctgttctgccctctcttctgggtcttctttcagcacctaaacgggaccccatgtcccctgcaatcttcataaggaagctcccttctcaggcactcatccagcctcctccagcactgctctgtgtgatcgcccatagccccaccctgctgactagggggcttctctgtccttgtctcacctcttaactgcaagacttgatggaggctccctcctgcgtgatgctctggactcttcagaacaccgtgcctcctggttctcctcccacctcagtggctggtctcctttctcggttcctcttttgccttccccttaaactccctctaaatgttctgttccctctccactcctgtgcactctcattgtggtctcatctagtcttgttgactttaaatgccacctgcaggctgacagctctgtgttcgtatctccagctgacctttctccctactccaggcttgtctgggcagctactagcatggcatctccacttggctatctcggagtcgcgtcacactgagcacctcttgagccctgcctccccaagtttgatcttccctcagtctttcacttctcatccttcagctcattcaggccaaaaatcatggtattgtccttgattcccattgtgtgtctcttgaaaatgaatgctgagctgtttcactggcaccactccgtacaaggtaccatcacctctcacttggattattaatattccctcctatctgttctctctgcctttgcctccctaaaatctgttttcaacacagcagccaaagcaagttttagattctaagtcaatcctgacactcttttcggagcccttgaatgacttcctatctcactcatcatgaaagtcaaagccccagtggcttgctgggcccgtgtaatgtgttgcttattatttctctgacttcagctcctgctgcttctcccttcactggctctgccccatcacactggagtcttgctggtcctcaaacatgccggtagactcttgcccctgcgccttcacatttgttgatctcaactcagaatccttgatggcaaataatcacaacttacccctctcctcctggtttctcgcaattctccccttctcagcaaggcctttcctgacgtcattactgaaaatgcagccttccccatgctgtgcccacactccctctccttctcactcttgctccgtagttctctctcaccacctgacattctgtgtgttttgcttattccctaatcgcgtctctcctcccatagagtgtaagtccctgtgagcagggatttttatctgcttgttgtacctagaacagtgcctggcacataacaggcactcagatagttaaaatgagcaaatggcttcgtgcacttttcagctgtttttgcattgccaaatttctctgttgtcattaatgttcttgtattggtttgatgagttaaatataagtaggctttctggttacttgtggccagggtaagtggatgttatcccttaaatgccattttggtcatgagcttttctttcagttcattttaattaagtaaaaggtgacacttagattaccattttcatatacactgcttgcattcatttcggctttggttggctaggtgggtgtacattacgaattgactgaggaagagaaattctatcggaatgctttaacacggatgcctgatggccctgttgccctggaagagtcgtattctgctgtcatgggcattgtatctgaagttgaacagtatgtcaaggtaagaaactcctaatttcattcaaatgtgcatatggtctattctagacacttaagagtacaagatataaagaacatggagctaaaaggtcttgactgtatgtatggttcactagatactatttgctgtttcaaagcagagagtaaatgataggatacatctttttgagttttaaccatgacgttcaagaatcttttttgatatgaaaattctgagagtctgaagtgagaatttctctaatagtggtgaaagacatgaaccttcttaatggaatgtgaacataagaggtgccagtattctacaaaatgaaaactcaaactattatttaactgtgttcttcatttgcaggtttggcttcagtatcagtgtttatgggatatgcaagctgaaaacatctataacagacttggagaagatctcaacaaatggcaggctctcctggtccaaataaggaaggccagaggaacctttgacaatgcagaaaccaagaaagagtttggaccagtagttatagattatggcaaggtgagccctgctgtctggttgaaaggtgtcacgggtagtgtaaaagcaacatttctgttagactgatattcatttgaaggataaacacgccagcaggaaagagctgatgatgtgttgtgtgctatttcaccctcaggtacaatctaaggtgaacttgaaatatgactcttggcataaggaggttcttagcaaatttgggcagatgctaggatcaaacatgacggaattccattcccagatctcaaaggtgaggacataggattctgcctctgtaaccggtctactggtgaaccccagctctgtgatgaaatactcccctctctctgaacagtcccgccaagagttggagcagcactcagtagacacggccagcacctccgatgcagtgaccttcatcacctatgtgcagtctttgaaacggaagatcaagcagtttgagaagcaagttgaggtgagctctgtgcatatttaaaaatttttggctgggcgtggtggctcacgcctgtaatcccagcactttgggaggccgaggcgggcggatcacgaggtcaggagatcgagaccatcctggctaacacggtgaaatgctgtctctactaaaaatacaaaaaattagccgggtgtggtggcgggtacctgtggtcccagctactcaggaggctgaggcaggagaatggcatgaacccgggaggcagagcttgcagtgagccgaaattgtgccactgcattccagcctgggcaacagagtgagactccgtctcaaaaaaaaaaaaaaaaattacactagatctctagtttaatttggcttctatagtattttgcattctaagagaatgacctgactcaacccttaaggcactcttttcttagtatggcccacagatcatctctgttacaacagcctgatgtgcttgttaaaacttagtgtaggccaggcacggtggctcatgcctgtaatcccagaactttgggaggccaaggtgggcagatcacctgaagtcaggagtttgagaccagcctggccaacatagtgaaaccccatctctacaaaaaatatacaaaaaattacctgagtgtggtggcatgtgcctgtagtcccagctactcgggaggctgaggcaggagaatcgcttgaagctgggaggcggaggttgcagtgagctgagattgtgccactgcactccagcctgggtgacagagcaagactctatctcaaaaaactaaataaataatgaaaaactcagtgcagatactgggcatctaggtttttcttttcttttcttttcttttttttttttgagatggagtctcgctctgtcacccaggttggggtacagtggtgtgatctcggctcactgcagcctctgcctcctaggttcaagcgattctcctgcctcagcctcccgagtagctggaattacaggcgcccaccaccatgcccggctaatttttgtatttttagcagagacggggtttctccttgttggccagggtggtctcgaactcctggcctcaagtgatctgcccgccttgacctcccaaagtgctgggattacaggcatgagccaccatgcccggccaagtatccttttaataacttggaataaagggtgaagcccagctccaccttgctttgtatcctgtccggggccatccggatgcagtgcagtgcaacacccagaccagctgcggtgggctctcagaggatgttgccctctggccacgatgtcttaggatggatggttttaggagaagagcacatgtgttgatcttctgtgttttgttttgtttgaggcagcatctcacctgtcacccaggctggagtgcagtggcaggatcctagctcactgcagcctcaatctcccgggctcaaacaatcctcccacctcagtctcttgagtagctgggactacagatacatgccaccatgcctggctaatttttttctttttaagtagagatgaagtcctgccatgttgcccaggctggtcttaaactcctggactcaagtaatccacctgcctcagcctcccaaagtgctgggattacaggcaagaaccactgtgtctggccagtcttacgtgttttataactataaagtgccttctctttcatggggctctaattaataatttctatcattgttatagaagaaaaaacttgatttattttttaactctcaaagctctaccgcaatggccagcgcttactggaaaagcaaaggttccagttcccaccttcctggctttatattgacaacatcgagggagagtggggagccttcaatgacatcatgcggcgaaaggactctgccattcagcagcaggtggcaaacctgcaaatgaagattgtccaggaggatcgggccgtggaaagccgcaccaccgacctgctgactgactgggagaagaccaagcctgtcacggtgagtcccgccaggtggggacgcaggagactcctcacccagcagtgtgatttggtgactttctttcaagcctaaaaggccttgctgtgactgagctttctagtattgaagactcttttcctttttgtagttaaaaaagcagatggagatagcaaatgtgaaaatatgaagcccagcttagacctctttttactcagaatggcattcagtagctggttttaaggattaaagtttttctgttcttagatcattctcttacgtagatatgcgcagaaattagagtttaatttcctgtagacaaaggccaagctttccactgctgctgctagttaatttaattttggttggatggtctctgtttttgccagtgctgccagtggattgtggggaggcaggttctgttgtcttcgtcattgtagccatttaaaccttccaccacccagaaactgccacatccacttttcttcatgcattgaagtatttattgagcaccgactgtgttccaggccttgttctaggtcattgagatatagcagtgagtgaaaaggacaagagcctcctaccttcatggaatcacgctccgtgggagagagaaaaaaaatgagcaagaagagacaggaaaggcaggtggtggtgctgctgcgacagaagcagatgagagggcgctggctcagtggctactgctgtgcctgggagggtggtgtggaagggggctggcaactcatgctgatagcagaggtgatgtagataacagtgtgtgtggttactggaagtggaattcaaaattttatttattttattttttgctccctttgttatttttatttgttattttctaagagtgcatgaaattatctggagagcatataaatacaaatgcctggacccctctcccctctataaacgctgatccgataacacaaacgcctggacccctctcccctctataggcgctgatccgataatacaaacgcctggacccctctcccctctataaacgctgatccgataacacaaacgcctggacccctctcccctctataagagctgatccgataatacaaacgcctggacccctctcccctctataaacgctgatctgataatacaaacgcctggacccctctcccctttataaatgctgatccaattgggttatggtgggtcccaggcgattggtttgttttctttttaattttcaaatttttatttatttagggaatataagcatagaaaagacaaatggaaaagatgtgaacatattttgaatattaatctgtttttctcatttggggatgtaagtttcccacagtaggcctaatgacaatgacagatttagccttccacaaagatctgctggttaattgtcccatcctgcctgtaaccgtttccgtgctgctgggcccctgcaggttctactgtgtgcttaattttgatttgatggtctctgcttttgccagtgctgctgttactgctaggttatgagtgcttgctccagtggaggagttgaatattaatcaatagcaagattctggtcatcaaaatttgaatatttctcatcactttaccttggtgccagtaatgtgttagagttaaaactttttcttttttttttttttttttttgagacggagtcttgctctgtctcccaggctggagtgcagtggcgcaatctccgctcactgcaagctctgcctcctggcttcatgccattctcctgcctcagcctcccgagtagctgggactacaggctcccgccaccacgcctggctaattgtttgtattttttagtagagacggggtttcaatgtgttagccaggatggtctcaatctcctgacctcatgatctgcccaccttggcctcccaaagtgctgggattataggcgtgagccaccgcacctggccaaaaattttttttgaggcagagtctcactgtgtcgcccaggctggagtgcagtgacatggtcatagctcactgaagcctccgtttcctgggatcaagcgttgtagctgggactacaggcgtgccccaccatacctagcttactgtttatttttagtagagatgaagtcccaggctggtcgcaaactcctgaactcaagcagtctccccgccttcacctcccaaagtgctaggattacaggcgttagccaccacgtccagcctaagtaaaatgttttttgatatcttgccttagtggaaaacagtaatattttgtacacctctcaacagttattaaaatgaaaaggaagtatgcaaatggtagtgttaatgctgaagtagagtctgtttctggtgatttctcattcctctcttggctgggtaactgatgtaacaactgtgttctctggggaagttgtggctggcaggccccggaggtttgtcctcttctatcactggggatgtgcacttgaggccgagtctgtgctgcctcttctcccgccttccagggtactgaataagacaatggctaaatcaagagatgctccaccattctattttatttatgtaaaatgttcatgtaaaaattaaattcgctactgtacacacatccaaagtggacatcttgttgaatgtttccttatgaagatgtgtgcaaagaatccgaaacgtccagaagccctgcaggctctgtgcaccattttaaagcctaaatgctcatctctcctgagacattgtgctccaattctctgtgctctgactgctttcagggcaaccttcgcccagaagaggcacttcaggctctcaccatatatgaggggaagtttggtaggctgaaggacgacagagagaagtgtgcaaaggccaaggaggcgctggaattgacagatactgggcttctcagtggcagtgaagagcgcgtgcaggtatgaaccactggggagtgggtggagaatcccgctccccacccggactctgccattgactttgttcatcctcagggccctgccagattctggggtgatttctatttccaaagtcaactgctttactattctcaatcgcaggtggccttagaagaattacaggacctcaaaggcgtttggtcagaactttctaaggtttgggagcaaatcgatcagatgaaggagcaaccctgggtttcagtacagcctcgaaaggtatatcatgaaatcggtgtttgtgtacgtctattttaacagttacagactttatttaggaacgtgacaagccaagtttgtgtatttgtattgtgagttcataagatgtcatttaatgtcctgcatgtcatttacattattcgtccaaaatactgtaaaacttattttgaaaccttttttttttttttttttgagacggagtttcgctcttgttgcccaggctggagtgcaatggcatgatctcggctcactgcaacctccgcctcccgggttcaagcgattctcctgcctcagcctccctagtagctgggattacaggcatgtgccaccacgcccggctaattttgtatttttagtagagacagggtttctccatattggtcaggctggtctcgaactcccgacctcaagtgatctgctcgcccggcctcccaaagtgctgggattacaggcatgagccaccgcgcctggcctgaaaccattttttaaagaaatatttcaccatttaaagaaatgttggcaagctaaatagcatcttatgtttctctcgacagcttcgacaaaatttggatgccctcctgaaccagctgaaaagcttccctgcccggttgcgacagtatgcgtcctatgagtttgttcagaggcttctgaaaggttacatgaaggtaggtggccagtatcgcacggtgatgagtgtccattagaaacgcacctgcacagatcactttgtttactttctccacagataaatatgctggtgattgaactgaaatccgaagcacttaaagaccgccattggaaacagctcatgaaaaggcttcacgttaattgggttgtttctgagctaacccttggccaaatctgggatgttgacttgcagaaaaatgaagcgattgtcaaggatgtactgcttgtggcacaaggggagatggctttggaagaatttttgaagcaggcgagtaataggactgaacggctgctttacgttgtgtttcgggctgttacatagatctgagctatgtaaaaatggagccttgtcatctgtggtccttttggttcttataatgctgggtcccttgtgcaggtagtgaatgcccacatattgataacatgcatctttctggtttgaattcagataagagaagtgtggaatacttatgaactagacttggttaattatcagaacaagtgccgcttgatccgtggctgggatgacctcttcaacaaggtcaaagaacacatcaacagcgtctcggccatgaagctctctccgtattacaaggtgctgttgctggggaagctttccctccccaccagtggtctcccacgctttcactgtaatgccttttcactgacagttactaggtacctgttttttattgtattttttgagacagggtctcactctgtctcccacgctggagtgcagtggcaccatcacagctcactgctgcagccttgacttcctgggctcaagtgatcttcccacctcagcctccaggtagctgggaccacaggcacatgccaccatgctgggctagctttttattttttgtagagacagcatctcactatattgcccaggctggtctcgaactcctgggcttaagcagtccttctgcactggcctcctaaagtgccgggattacaggcgtgagtcaccacagccagtcaatacttgtttttttgtttgtttgcttgcttttttgttttttttttttctttttttgagatggagtctcgctctgtcacccaggctggagtgcaatggcacgatctcggctcactgcaacctctgcctcccgggttgaagtgattctcccgcctcagcctcccaagtagctgggattacagctacctgccaccatgcctggctaatttttgtatttttggttgagacagggtttcaccatgtttgccaggctggtctcaaacttctgacttcaagtgatccacccgcctcggcctcccaaaatgctgggattacaggcgtgagccaccacacccgtctacttgttgtttaaaatgtgaatcagattacttcatgagatcctgatctgcgctttttcagtgagttttggcatatctgtgagtagaagggtcagcagtttacctctccctcctgtctgcccaccaggtttttgaagaggatgctctcagctgggaagataagctgaacaggatcatggctctctttgatgtgtggattgatgtgcagaggcggtgggtctacctggaaggtatcttcacaggcagtgcagatatcaagcacctgctgccagtggaaacccagcggtttcagaggtatggcctccagccagagagccaaatttgccagcggctagtgactactctacacaaaggctgacgcatgttttaatttcatttgtagcatcagcactgagtttttggctctaatgaaaaaagtgtccaagtctccccttgttatggatgttctgaacatccagggagtacagaggtctctggaaagattggcagacctgctaggaaagatccagaaagcattgggagaatatctggaaagagagcggtcatctttccccaggtaagatccttgctttgacttggcctggagtcaagttgaatttcagttgtgcatttttccagtgatcttctttcccttctgggcctgtgtttgttagttttgacatcaaggattttgttagccaataatacatataatgattaccattcccttccctgtcatgcagtgattactgattgtacctaccttggattttttaaattgtcctaccttggatttcttaaatccttaatttaactatcatctaccctccaaggcagcttgcattacatctcttcagtgtttatctctggcagttttcttttttttttttttgagatggagtcttgctctgtcgcccaggctggagcacgtggtgccatctcggctcactgcaacctcctcctcccaggttcaagtgattctctttcctcagcctcctgagtaactgggattacaggtgcccaccaccacacccggctaatttttatatttttagtagagatgggttttcgccatgttggtcagacttgtctagaacttctgaccttaggtgagccgctcacctaagtcacctaagtgctaggattacaggcatgagccactgcacccagcctctgacagttttctaagtggcatcttttcctttctgaatagtttgcttaggctgaattggacagattcttttaaaaatgagttaataggccgggcgtggtggctcacgcctgtaatcccagcactttgggaggccaaggtgggcagatcacctgaggtcagtttaggaccagcctggacaacatggtgaaaccctgtctctacaaaaatacaaaaattagccaggcatgatggcagctgcctataatcccaggtactcaggaggctgtggctagagaatctcttgaatccgggaggcggaggttgcagtgagccacgattgcgccgctgcactccagctggggtgacagagcaagactccatctcaaaaaataaaaaagagttaataaagtaacttactggcccggcgcggtggctcacgcctgtaatcccagcactttgggtggccgaggcgggcggatcacgaggtcaggagatcgagaccatcctggctaacatggtgaaaccccgtctctactaaaaatacaaaaaaaaattagccgggcgtggtggtgggcgcctgtagtcccagctacttaggaggctcaggcaggagaatggcgtgaacccgggaggcggagcttgcagtgagccgagatcgtgccactgcactccagcctgggcgacagagcaagactccgtctcaaaaataaataaataaataaataaataaagtaacttactaaggcaaatgacatgaaattctttgcattcattgaattcctcttcaagatcttgttaggtaagtgtgtatcttttgccaagggctagaagaaattctgatgtgatctgaatttgggctggagattgccaccaccagacacatgttctttcccttcctgcagtttgaaatcttaccttgattcaccttatatgtgtatataatatttttgcaacttgagtgttattttaattttaggttctattttgtgggtgatgaagatttgcttgaaatcattggaaacagcaagaatgtcgctaaattacagaaacacttcaagaagatgtttgctggagtttcgagcatcatcctgaacgaggataactctgttgttttgggtatttcatctcgggaaggagaggaggtaaatttatgttcgtaacttttaaaacttctctcacatttttgcatacctcatttcttaaaattgtatttatttcaggttatgtttaaaactcctgtgtcaattactgaacatcccaaaatcaatgagtggctcacattggtagaaaaggagatgagagtcaccctggccaaactgcttgctgagtctgttacggaagttgagatttttggtaaagcaacttcaattgacccaaatacctacatcacttggattgataaataccaggtaatctatagtagaagtgagtgggctcgtggtgaaaacgcagaccaatctttaaaatgatcctttgggatcttgtttctgtgtctttcaggcccagcttgtggttttgtcagcccagatagcctggtctgagaacgtggagaccgcactgagcagcatgggcggaggtggagatgccgcgcccttgcactctgtgctgagcaatgtggaggtcaccctcaatgtgttagcagactctgtcctcatggagcagcccccactccgaaggcggaagctagaacacttggttagtctcacacctgactccttccttaccagttagactcttacaccctcaaccacacagttaaatggaaatcatgcttgaaaaaggtttcaggtagtatcaaggagaacagtggatggtgtatggatatcctctgagggtgggcatttggctccctgtccctgttgaaaggtaatctcaggggcatgcaggggttacgcgacatcacggtagagaggaagggatcaaccttggtcaggatctcttgctctttcctgtcatctccccagagaggtggccacagcagtgctaagctgcacggcacgggcagtgcttgctgcgagccccatggcggcacgtggcagactcctaggatagacgtcagaaagctagtcttccatgatgttttagaatggttgcagaattttaaaatatttaaagccaggtgtttctgtttctttgtttttgctgcagctctgggttctgtgtaataccatctcatgagtaacatttctctcatctctgaaagtgaatttgccttttggaacatttactgaaagccattgtaactggacctagaacctcaatttcagtttaacagtccacaaacccggagaatgcactgtattgctttagtgtagatgaacttttaaagtgactctctttcttcagattacagagttggttcaccagagagatgttacaaggtccttgatcaaaagcaagattgacaacgccaaatcttttgaatggctcagccagatgcgattttactttgaccctaagcaaactgatgtgttacagcagttgtcaattcaaatggcaaatgccaaatttaactatggctttgagtacctgggtgttcaggacaaactggtccagacccccctcactgaccgctgctatttgacaatgacacaagccttggaggccaggctggggggttccccatttggtaagttcttccacagatctggacagatggaatcatatattaaaatgtttaaagataaagctaatgatttgaatgtacttctttttgagatggagtgtctgtcgcccaggctggagcacagtggtgcgatcttggctcactgcaagctccacctcccgggttcaagccattctcctgcctcagcctcctgagtagctgggattacaggcacacgccatcacaccaggctaatttttgtatttttcatagagacagggtttcaccatgttggccaggctggtctcgaactcctgacctggtgaccccctcaccttggcctcccaaagtgctgggattacaggcatgagtcaccacgcccggcctgaatgtacttcttaattatgtggtgtgtacattctaaaatcttaaatttgtttgcatttattactactttgatttttttttttttgagatggagtcttgctctgtctcccaggctggagttcagtggtgcaaccttggctcattgcaacctctgcctcccgggttcaagcgatctcctgcctcagtctcccaagtagctgggactacaggcgcccaccaacatgcccggctaatttttgtatttttagtagagatggagtttcaccatgttagccaggctggtctcgaactcctgacctcaggtgatctgcctgcctcggcctcccgaagtgctgggattacaggcatgagccaccctacctggccactacttggattttttaaatgagttgctttttgtagttcttttaaagctaaagatatgttttcagttaggtaatggactcaagcactctgttgcttttctttaaacaggacctgctggaactgggaaaacagagtctgtcaaagctcttggccatcagcttggacggtttgttttagttttcaactgtgatgaaacctttgatttccaggtgagacactttatgggatccacctaaaatgtaatgccctgcagggatcatttggggaatatcaagctccgtacctctctcaaagccattggtcttacagctcagcgtggtttatatggcctcctgagtcctgtagtagggataggtgttattttgaagtgtttgaggtgtccagcatacatgcattgaagttgacttcagtttcatgttttcaaagttagatctttagtgtaatatttttctaaaatgtcagttttttgacgacatttttagtgcctgtgtcttggaataagcacattatggaagaggtttatctttaatcaacaaaaagtgatagaataaaaacagtagctttgtcattgagatttttttggcacagaaggaaagaaggtgttatactttacatctgtcatgataacggctgttgttcatgaagtaactgctgtgtgtaggcactgagcccctcacctgaggcgtgactctaatttatccttcacagccaccgtgggagtaggtagtagtattcccatttcacagatgaggagatgtgcatttcaaaaagatgtgacttgcccaaggccaagcagattgtcagagtcagggtttgagccccgtgaagccagcactgaggcaggtggtatggtagtctgctcaggccaccatatccaagcagcacaggctgtgtggcttaacaatagaaatgtatttcctcacagttctggaggctggggagtccaagatcaaggtgccagcggggttcagttcccagtgagggccctcttcctggcttgcacgtggctattttgtcgccacaaggcctttcctcgggatacatgcagggagagcgctctggttcctcctcctcttcttagaagggcaccagtcctgtggatcagcggccccaacccttatggcctcatttaaccttagttatgtccttacacgctctttcgctaaagacaaacccactagggttagggcatcaacatactgatttgtggcaagggagaggggagacaattgagggcacagcaggtggttttagcgcctttcttcctctcctttccaggcaatgggccggatctttgtgggcctttgccaggtgggtgcctggggctgctttgacgagttcaaccgcctggaggagcggatgctctcggctgtgtcccagcaggtgcagtgcatacaggaagcactgcgtgaacattccaaccccaactacgacaagagtaagacacctcttcttcaaaaattacttagagaatgtagagggaaattccctagtgaactaattttctacctcttggattagaaataagcaagaatttagctcacaggagctcactgttacaggcagtgtagtgagctgtggttaaagacggaaggtaagaaacccaggccaggcgtagtggctcacgtgtgtaatcccagcactttgggaggctgaggcggacagatcacttgaggtcaggagttcaagaccagtctggccaacgtggtgaaacccatctctactgaaaatataaaaattagcctgacatggtggtgcacgcctataatcccagctattcggaaggctgaggcagggagagtcccttgaacccaggaggcagaggttgtagtgaactgagatcatgccactgcactccagcctaggcaacagagcaaaactgttcccccaaaaaaagaaacccaggactgtattgcatcacagcttttagtcctcattctagggcagcagcatagaggtttctatgtcctaggacaaccaaaaacctgagcagtccttcctcagccagccagatgcccccgtgctcccttagagcttgtgtgttccctccatggtctttgccacgggatgagcgtgtcctctggtgcgggcccttggtgccccctcttcattctcacatcgtcagagagccagcctccccagccacctgtctggccagtgttctgccatctgtctttggaaacaagccctttatcacgataggagcagctgtcggagaggccccagggaccacttcccttcccagttcaacacaaagtcccagcatgtggggtcagggagggtgggatgctgaaggaggcaaacatttgggtattgggtaagtgtgaaattctgtcttatgtgcacagcgtagcttttaatgtttccttttattgcataataacaacttgccttatggagaattccccagacctcctaaataaaacaaaaggagtgtggaggaaagcaatacttgcctttgtgatcagtattctcttaaggcgagaatacactttgttccaaagtggctcagaggtgcttggaggtttgggttttttttattttgatgatgctaggagcaggtaattcccatgatgtaagccagtcagtgtcgcggcatttattccttttttttttttttgcacaatttgttggactgcatctctatctcgagttctccatgacactcaggtgtggtgttgcccaaataaaatagtggtctctgcctctggtggcttgacctgggacacgtgcacatgaggtacatgggaatgggtccacctgggctgggagaatgtggctggtggtccccgaagaaaggccaaagagcagcccccgaggaagcgtctacttcagctccctgggagaacgagagctttgtctgttgttttagagacattttagaatgcattttgttttttttttttaacatttctagtcttaacgctatcatctcattctcagcctctgcccccattacttgtgagctgctgaacaaacaagtcaaggtgagcccggacatggccatcttcatcaccatgaaccctggctacgcgggccggtctaaccttcctgacaacttgaagaagctgttccggagcttggccatgaccaagcccgaccggcagttaatcgcccaggtcatgctgtactcacagggtttccgcactgctgaagtgcttgccaacaaaatcgtcccgttttttaagtaagtagcctagaattcttcataatcatgtttcttgcatatgttaaatgtgtccatttaaccttaaaatttttatatgtaatgatggtacgtctttcaaaatatccatctctggtttcttgacacttgaccctattattgcttaaagtatactgttattaaagatagcctttttttcttcttttctagactatgcgatgagcagctctcttcccaaagccattatgacttcggtcttcgggctttgaagagtgtgctggtgagtgcaggcaatgtgaagagagagagaatccagaagataaagagggagaaagaggaacgaggggaagcagttgatgaaggagaaattgctgaaaatctccctgaacaagaggttcgttacaaacgttttgatcactcaaaccttatacgttatttaaatttacctttttaacatttaagccatgacttgtgagttcttcttgcagttcacatgtcttgggatggctgaaatagactgtaatgttgacccagtgagtcgagtgcacgaatgtgggcgagtggtgctcgcaccctttgttcaccaacagttactgatcacgcacctcctggggatgcagcgggcagtacttgagccatgctgcgctgctcacagcccagccctctccccgtagattctgatacagagcgtctgtgagacgatggtgccaaagctggtggcagaggacatcccgctgctcttcagcctcctgtcggacgtgttccctggagtccagtatcacaggggtgagatgactgcccttcgagaggagctgaagaaagtgtgtcaggagatgtatttgacatatggagatggagaagaagttggtggaatgtgggttgaaaaggtaacttggattgtttcactggccactgccctcacagaccctgctggctttagtgtctggtaatgacaaccgtgggcccttcgatgaaactgtccacaaaggctgtggaggtgcataatatgctttatgaagatttgcccaaggcctatttgaatttttgttgttgttgtttaaatgaagaggaaacaatacttaacctgaaaattttacatgatacagttcaatttctgaaaatgctaagtgcatgactatattggaaagttgtttatactgataaaaattctgcttaccagactttccagtgccagagatgaacaacctgaatcgctgatcaatacgtagtttacattctgtattggcttctttccttcctctatgtgattcatttaagaaaaagtttattgtttacacaagctgtgtgtgtttggcctgagagatgctgtacgggattgaacacatagctcatccattgggtctcttgttgtcctcggcgggatctgatgtgtccttgttgaggctgctcattggtgtctcctgtcccactggctccagccttcctgacttactaaagaactcgccacagtttggaaatgtttgttttacatgtgacctgtgtaacatctctccagctggggagtttcagtacttgcctttaataatccatagataggcgcttgtaaagccagctacttgggagagtgaggaaggagaatcacttgaacctgggaggtggagcttgcggtgagctgagatcgtgccactgcattccagtctgggtgacagagagagactccgtttcaggaaaaaaaaaaaaatccacacataatgtttcttgctcactttcacaagaggtggctgggcgaggagctgtccccattcctcctctgggatggtcactgtgctggtctgttgggccctgcaggttctccagctctatcagatcacccagatcaatcatggcctgatgatggtggggccctcgggaagtgggaagagcatggcctggcgtgtcctgctgaaggcattggagagactcgagggtgtggaaggtgtggcccatatcatcgaccccaaggccatcagcaaagaccacctctacggaaccctggaccccaacaccagggaatggacagatgggctcttcacacacgtgctgagaaagtacgtcttctttgatctgtgtttgtgttctcctggatatgggcgctaagtactttgctctcacaagagcagagtatacgttatttttcaaccaaagtctgagcaaattaaaggtcatttcagaaaccatcatcggtaaacatgcctaatgttaaaatcttgatttaatcagcagctattttaaaatccttcccaaccaggatcatcgacagcgtgagaggcgagctgcagaagcgccagtggatcgtcttcgatggcgatgtggatccagagtgggttgagaacttgaactcagtgctggatgacaataagctcctaactttgcccaatggagagcgcctcagtcttccacccaatgtaagtagccttttgtatgtcgtcaactgaataattccttttggccaactaaacttcgtgtgctagctaagtgcagctctggagtcatggacccagattccatggagtagtgatcattgtgtaagtaattttcaaagatagcatctcaactgctagattttttttccatttccatggctagtgagaaacattttaataggttttattgatggctttctatcatttattgagtaataagcacactctatgattatcagttaaccctgtatggtggggttgtcgttaaggtttcttaagctgttatacatctagagagctgggaaaatgagaaatttggaatggggctttctaggctgtcccttggaaaatgagtgcatgatgcaggtgcctgacaacacctactgatcagtaaacacagtcaggcccggtatggatttgcactgagtcagaccctgttctagatgctgaaaatacagcagtaagaaagcaagaagacaggccgggcgcggtggctcacgcctgtaatcccagcactttgggaggccgaggcaggcggatcacaaagtcaggagattgagaccattctggctaacatgatgaaaccccatctctactaaaaatacaaaaaattagcggggcatggtggtgggtgcctgtagtcccagctactcaagaggctgaggcaggagaatggcatgaacctgggaggcggatgttgcagtgagccgagatcgcgccactgcactgcagcctgggcgacagagagagactccgtctcaaaaaaaaaaaaaaaaaaaaaaaaggcaggaagacaaaagcccttgctcacgtgtgatgcaattggacaaacaaaatgaatagtgattggtgcaaagaaaaaaatggaaagcgagctgtcaggtgttggtgggggttggaggttaaaatgtgaagccttccctgagaacgtagtttgagcagacacttaggggagtgagggagtaggtcccaagtctcccaagtattctgggcaaaggaacacacagcaggagtagcaggtctgggacagggggccggtgtacttgaggacagcaaggggcagtcggctgaagcggagaggactggggaggacaagtcagggctgagactagagaggaaacgagccaggtcaggggcctaggaggtcattgtcgggggtgtgagtttgtacactgggcaagctgggatccatggagcagcctggacaggagcgatgttgcctgatgtatgtccatgaagatccgtctggctgccgtttggagaatgaagagggcagggtgaaagccaggaggccagttggagactgcctcagacctccaggcaccagggacggggcgagctggcagcagcgaaggtgctgagaggtgactgactatggctggagtttaaagcatgcgtgggatttgctgatggactagatgtgggtgtgagggaaaggaatcaaggatgatgcgaggtttctggcctgatcagcttatgagcctttaacaacaaggcttaggattggtatttatctcagcttcaggagccagccatggattcttagtactgtctgaaagtgtgcacttactccaacaactcaagttcctctctgacagctgatccagtagagtctaacttgtcagaggagattaatctccttgtgaggcaattacagctccgaggttaaggctctggagtccgaccacctgctttgaatctcaaccacttactagcagtgggaccccagcaagtcacctgcgccatctttaaactggaggtgaggctgggcatggtggttcgtgcctgtcatcccagtactttgggaggccaaggcaggtggatcatctgtggttaggagtttgagaccaacctgaccaacatgatgaaaccccgtctctactaaaatgacaaaaaattagctggcgtggtggcgcatacctgtaatcccagctactcaggaggctgagacaggagaattgcttgaacccgggaggcattgcagtgagctgagatcacgccattgcattcgagcctgggcaacaggagcaaaactccatctcaaaaaaaaaaaaaaacaccagagacgacagcgtgcctgcctggtcaggttatgtgagactggagggatccacgcccggtgcgcacccaggacacagtcactgctgacatcacacttggaggggctgttgcttctgtgccctcaagaacagtgggaaaccttaaacaaggtggtttgccctattcttctccctgccacacacacttgtcctgcccagattcctgtagagagaatggtgaatactgtagtgatgtgagctgtaggtgttttttgttttttttacataagtgcagaaaaaatttttttgagacaggttttcactgtaacccaggctagagtgcagtggcatgatctcagctcactgcagcctccacctcccaggctcaagtgattcttctccctcagcctcccaagtagctgcaattacaggcacacgccaccatgcctggctactttctgtataggaaaattaagtttaaagtcaccctttcagtgtatatataggtaaaagaatcttaatgtccaggtttcttccaaacctatgtcattaaatctgcttaatgttttctttcaaggtgagaataatgtttgaggtacaggacttgaaatacgcgaccttggccacagtgtcgcgctgcggcatggtctggttcagtgaggatgtgctgagcaccgacatgatcttcaacaacttcctggccaggctgcgcagcatcccgctggatgaaggggaggatgaggcacagcggcggcgtaagggcaaagaggatgagggggaggaggccgcttcccccatgctgcaggtacgcccaggtgggaccccacatatcatgacctgagggtgctaggatattcagatgtggtctcgctgtgttgcccacgctggtcttgaactcctgggcccaagcaatccacctgccttggcctctcaaagtgctgggattacaggcatgagtcactgtacccagccaacttttgtgtaatcaatgttgtcttctgccagcttaaacaaggaagcccagctgtagcagctacaaatgttaaaagtcacgtatgggaaaatttaaagaattcttttcattatcttacttttctctacaaattgatgaaagactgcccttttccatgttcagtgggaaaaccaaagttcctgggaagcagggtttttgagaaccaccagggtgaaggaatgaggactggtcattgaagcttcatccaaaatgagttttccaaggtcgtatgaccttctcctgggaccaggttagaatcgatgaaactcgcctgccttttgaaagatagttaagtatcactccttccactttctagatccaaagagatgcagctacgatcatgcaaccgtacttcacgtccaacggcctggtcaccaaggcgctagagcacgccttccagctggagcacatcatggacctaacacgcctgcgctgcctgggctcgctcttctccatgctgcaccaggcctgccgcaacgtggcgcagtataacgccaaccatcccgacttccccatgcagatcgagcagctggagcgctacattcaggtcagggggcatcaggggcttcacagagctcaccactgcgccagaccacaggtctgaggacctctgaaatgctgcacctgtggggatgtgcgctctctcctaggcgaggcagagccttcgttgaggggctaggaaaggtgcagtgggtgtctgtgatgcaagaagactgggaaccactgtctttaggttaactttgctgtaagtgtctttcttttgttgttgaaattttataaaaatcaaagtttaattccctttttaatagcgatatctggtttatgccatactctggtccctgtctggagacagccggctaaaaatgagagcagagctgggtgaatacatcagaagaatcacgaccgtgcctctgcccactgcgcccaacatacccattatcgattatgaggtgagcatgcagctaccacccgtgtttctgattctcgccttgttgatttaactcatcctggaacaagctgaccatggaccttggcttcgtcttttcattttattccatttcatagaaggactttatccttttagttccatgtgttagcaaagagtgcagattaacctgaccaattacttccttgttctgaaagttcaagtttgtgttcaggtaaacaaacctcgtgaggaggcaccttggttgcagccggactcacacttccatctccgtgtgtaggtgtccatcagcggagaatggtctccgtggcaggccaaggtgcctcagattgaagtggagacgcacaaggtggcagcccctgatgtcgtcgtgccaacgctggacacagtccgccacgaagccctcttgtacacttggctggccgaacacaagcccctggtcttgtgtggccctcctgggtctggcaagaccatgacactcttcagcgccctccgggccttgcctgacatggaggtaaagaggccaggaggtgggcagcagaccttttggtgctgagcatggggttggtcttacagtgtggttttgtgtcttccctccaaaggtggtgggtctcaacttctccagtgctactactccagagctgcttctgaagacttttgatcactactgcgagtacaggcgcacacctaatggggtggttttggctcctgttcaacttggaaagtggctggtgttgttctgtgatgaaatcaacttgccagatatggataaatatgggacccagagggtcatatccttcatcagacaggtttgtttctatccacaaggcccttcctgccccacaatgtttcttgttcaagttttgctcttaatgtggtacctgtcccttccttcagatggtggagcacggaggcttttaccgtacctcagatcaaacatgggtgaagctggagagaatccagtttgttggggcttgtaatccccccacagaccctggaagaaagcccctctcacacaggtaaaacagctcggtagactgctctgcttcacacacgcacagctccaggattgctgtaaacacagcgccacaaaaacctggttttgataataaagacaacaatactgcttattgtggattcctcttgggttacttctctgtgctgtaatgccaggaaaacatgttaaaaataaaagcattggccgggcgcagtggcttacgcctataatcccagcactttgggaggccgaggcgggcggatcacgaggtcaggagattgagaccatcctggccaacacagtgaaacctcgtctctactgaaaatacaaaaacaaaattaaggccgggcgtggtggcttacgcctgtaatcccagcactttgggaggccgaagcgggcagatcacgaggtcaggaggttgaggccatcctggctaacacggtgaaaccccatctctactaaaaatacaaaaaattagccaggcatggtggcaggtgcctgtagtcccagctacttgggaggctgaggcagcagaatggtgtgaacctgggaggtggagcttgcagtgagctgagatcgcaccactgcactccagcctgggcaacagagcaagactccatctcaaaataaataaataaataaaataaaatgaaataaaagcattgatctcttggtagtgatgaactgctccagactcatctgtagagccaagatgagcctgaaataagccttggttattttttcatctttgctggtttttcaagtgttttccatcgactgttgtgtgtcagaccccaagcctgagcagcgtgtgtgtgatctcagctaacactgatgtcaagtctgcatagctgggttaggaagcgacctccagacagggccctggacagggcgactccactggcacactgccccttcctgggaggcgctgtcagggaggggcgctgagcggggctatctgtgcacaggttcctgcgccacgtgcctgtcgtgtatgtggattacccgggccccgcctccctcacacagatctacggcaccttcaaccgcgccatgctgaggctcattccatccctgcggacgtatgcagagccgctcactgctgccatggtggagttctacaccatgtctcaggtacgcagagtttctttgctcttccagaaattgttttcctctcataattaaggcactcgattggtcaggtgtggtggttcacacctgtaatcccagcattttgggaggccaaggtgggtggatcctttgagcccaggagtttgagaccagtctggacaacatggcaaaaccctgtctctacaaaaaataggtgggcgtggtggtgcatgcttgtaatgtcagcttcccaggaggctgaggtgggagagttgcttgaacctggaggcagagcttacgatgagccatgattgtgccactgcaccagcctgggtgacagagtgagactctacctcaaaataaaatgagaagtttattgaaataaagattggactttattcagagatgttattgagccgagagactttctccaaggtctgtcatcaaagtcacttttctatgcaggtgctaagactgctgacatttccatgcttaatcattatcctatgcatgtgtatgtatgtgtatatgatgaaaatagagccatacagtttctaaatgtatataaaggctgcatatctgccagattgctctcaagatggttggaccagctacgcctccaccagcagcacccgcttccctgtattctgcaacatttaaaaaatagtcattaacaaaaatgtctttgcccatttggtgagaaatgactctcgttgctatttgcatttctctgttgagcctcccatggagccgctggctgcgggggatgagtgggagccgccaactgccctgctgtgtctccctcgctcttcatgctttgggacagctttcttgtcataggtggcagatgctttttcccagtatttaatttgcttttaagtattttcagaaggattttttgtagtttcattgtttaaatatttaaatcgttaaatataatgtatttcagcataaagtgagcagcttgaatctaactttgttctggacagttatttatccaattgttccaacattgtttactcatttggagacggagtctcactctgtcgccaaggctggaatgcagtggcgcagtctcggctcactgcaacctccgcctcctgggttcaagcgattcttctgcctcagcctccctagtagctgggactacaggcacccaccaccatgtccagctatcttcttaaatatttcagggtctaggttctttaatgtaaacatgttttgccacattttaccttttgaccacttctctgtgtcttaagatatttacgtgtaccttccatttttctcattgccataggagagattcacccaggatacacaacctcactatatctattcaccccgtgaaatgactaggtgggtgagaggcatctttgaagcgctgagacctctggagaccctgcctgttgaaggcctcattcggatttgggcacatgaagctctgcgtctcttccaagataggtaagggaagccgaggatccagttggtcccattctcccctgctctgagttcttacagctgtcgaagctggggtctttgcaggggtggtctgcctaagttagagccaggtggtgccagtggtggaaggagcagagtcagccagggcagcctcccgtctggacactggtcacagttgccccagggtaacaaagtcacagtgcgctgaatgcaccggctggcccaccactgtctgcttacacaaggcactttcataaaccttgtggctgtgaacagggtacttttttttttaaagatacatcatagaagtcaaaaaacggggcactttaataaaccttttaaactgtcaggtgggaccacaaaaggtagcagctgcctgtgataaccttaccagagcacgggttcactgctgagttaaaaggtctcccaacaactgcccagtgtgcgtgttccgtaaccaccacccctcttcctgtttctcagtctgtgttctcatcaaaggctttgcagctgcagctctggggcactggttttctcttttacctgttgcccacttggatcaattcttgtcttgtaagttttgagtttttctagttaagtgaccaatacttaagggaaaaaattgctaacggatgactgatcggcatcaactgtggaaggttttgtggtttgaattgcagtaagatgacttggcagatggttccctccagactaagaaatgcttaagtgtttggcagctgtgcctctggaccaggtgtcatcctgcagtttttcctgtcattactgtacaaggagtctcagaatactgcctagttgtaatcactgggtttccaacccgagtccttggcattcttgggcaacaccgggtacattactgacagccactgtaagagatgagcaggcaaggcagagtgcagagtatgttggctgtggcagccctgtttttatttcttattggagttctgctgctttttaaacagtcttttgttattgttgctatgtcagctaccttcactctccccttttcaattaaaaaaaaattggctgggcatagtggttcacatctataatcccagcactttggaaggtcgaggcaggaggatcattgagcccaggagttcaaggccagcctgaccaacatagtgagacccccatctctacaaaaaataaaaaattagccaggtgtggtgacgtgtacctgtagtcccagctacttgggaggctgagacaggaagatcgattgagcctgggaggctgcagctacagtgagccatgatcgtgccactgcattccagcctgagtgacagagcaagaccctgtctcccacaatatagttttcacagatttctagtaccacagagaattttgtttaaattcaaatgtcgcaacagcagttgtgcttacaaattcagattggcttcagtaagtatatacctgccttcactagaccctcacctggtagcctgcataggagatcttacagtcagcttctcaaaaggtcctcacacagcagcgcagtcacagtctcgcctgcttgccttgtagtaagtcttacacctctaaaactacacacatcacagttcccatttcttttttctttttcttttttttttttttttttttgagacaagagtctcgctttgtcacccaggctagagtgcaatggcatgatctcagctcactgcaatctccgtctcctgggttcaaagcaattcttgtgccccagcccccagagtagctgggattacagacatgtgccaccacgcctggctgatttttatatttttagtagagacagggtttcaccacattggccaggctagtcttgaactcctgacttaaagtgatccgcctgcctctgccctcccagagtgctgggattacagcttgagaccagcatagcgaaaccccatctctactaaaaatacaaaaattagctgggcatggtagcatatgcctgtaatcccagctactgaggaggctgaggcaggagaatcgcttgaacctgggaagcagaggttgcagtgagccaagatcgcgccactgcacttcagcctgggcaacagagtgagactctgtaagtaagtaagtaagtaagatcgcgccactgcacttcagcctgttgccaggctgtaagtaagtaagtaagagtgagactctgggctgggcgaggtggctcacgcctgtaatcccagcactttgggaggccgaggcgggcggatcacgaggtcaggagatcgagaccatcctggctaacacgatgaaaccccatctctactaaaaatacaattaaaaaaaaaaaattagccagccttggtggcgggcgcctgtagtcccagctactcaggaggctgaggcaggagaatggtatgaacccgggaggcggagcttgcagtgagccaagatagtgccagtgcactccagccttggcgacagagagagactccgtctcaaaaaaaaaaaaaaaagtgagactctgtaagtaagtaagtaaataaataaataaataaaatttcaggttgcctaagctgtcatgagttcagcttttaggttcatccatgcatagtaaaggaagatgtgtgataaagactgactgcatcctttggaagagcccacagcacccacaaacatggtgaacatggtgcttcttcaccgtgccctctagttacctaaatgcacatgctgctctccccacagactcgtagaggatgaggagaggcgttggactgatgagaacatcgacacggttgctctgaagcacttccctaacatcgacagagagaaggcaatgagccgacccatcttgtacagcaactggctgtcaaaggtagcaaactcgcatcatttcagacatacttctttttctgccatccctttctaacactaacgaattctaacgaattatcttctactcaaaaatatctttaggctgggtatggtgtctcacacctgtaatcccagcactttgggaggctgaggcaggaggatcacttgatcccaggagtttgagaccagcctgggcaacatagtaagactccacctctacaaaaaaatttgaaaatttagccaggcaaggtaactcacgcctatggtcccagcaacttgggaggcttgagcccaggaagtcacagtgagctgtggtcacaccaccatactgcagcctgggtaaaagagcaaaaccctgtttcaaaaaatacttcagaaaacaaaatatcagccgggcgcggtggctcatgcctgtaatcccagcactttgggaggctgaggcggtggatcacctgaggtcgggagttcgagaccagcctgacctacatggagaaaccccatctctactaaaaatacaaaattagctgggcgtggtgacgcatgtctgtaatcccagctatttaggaggctgaggcaggagaatctttggaacccgggaggcagaagttgcggtgagctgagatcgcgccattgcactgcagcctcagcaacaagagcgaaactctgtctcaaagaaaaaaaaaatacagcgaggtgcaatggcacacgcctgtaatcccagcactttgggaggccaaggcaggcagatcacttgaggtcaggggttcgagaccagcctggacaacatgctgaaactccatctctactaaaaagacaaaaattagccaggcatggtggcatgtgcctgtaatcccagctactcaggagtctgagaatcgcttgaacccgggagacagaggttgcagtgagccaaggtcacgccactgcactccagcctgggcaacagagtgagattccgtctcaaaaaaagaataaaaacttaaaaagagtccagcttgggtaacaaagtgagaccttacctcaaaaaaacacttaaaaaacaagaaaaatctctttgtcctaaaatgcactataaaataggctgcggttacagcagtgatgtgctacgggtttgcagtcactgatactttagggcaggaattcccaggagtatggctggctggctgctgttggggttctgacttctgtgtgagggtcgagccattggatttccagccggtggaaggtgttgcttcagcgggtttgcagtgaaagaaatctttgcttcacaaatttgttttcacattcctcacactgaaaataggacaattgtgaataacttgtgtgaaaatgtttcatatgctaaaatgctagatggagttcacctctccagaatagctgtgagttgtcctttttctctgcaaaggatgaggacgtttaccgagttacagtcttgacatgcatttcattgaggagccccaggtgatagacgtgagtaagagcttcctttaggcagctcccactccagtggaggaaagagcaggacagagggagataactcaggctgggaagagatttctgggagaatgacccttgcactggtcttcgtgtgtttaggtcttctgaatggctttcagtgaagttcagctttctccagaaaggttcaccacgtcagggagggcatacaaggcagagcgcctgataggagctgggagtagtaaggtgggtgtgttcaatattggtagaattttctatatattttaagactctaggtacccattctttttcatttacaggaaacttctccctgtggcttatcttttttttttaactctttttttttttttttttttggagatggagtctcgctctgtcgcccaggctagagtgcagtggtgctttctcggctcactgcaagctccgcctcctgggttcaccccagtctcctgcctcagcctcccaagtagctgggactacaggtgcccgccaccacgcccagctaattttttgtatttttagtagagatggggtttcaccgtgttagccaggatggtctcgatctcctgacctcgtgatcagcccatctcggcctcccaaagtgctgggattacaggcatgaaccactgcacccagccatttttttactctttataaggtcttttgaagaacaaacgttcttaaagatgtatctttcaggctgggcacagtggctcacgcctgtaatcccaacactttgggaggccaaggtgggcggatcacctgaggtcaggagttcgagaccagcctgcccaacgtggtgaaaccccgtctcgccgaggcaggtggatcacgaggtcaggagttcaagaccagccttaccaacatggtgaaaacccatctctactaaaaatacaaaaattagccgggtgcggtactgcatgcctgtaatctcagctactcaggaggctgaggcaggagaatcacttaaacctgggaggcagaggttgcagtgagccgagatcgcgccattgcactctagcctgggcgacagagggagactctgtctcaaaaaaaaaaaaaaattgccaggtatggtggcgtgtgcctatagtcccagctacttgagaggcaggagaatcacttgaacccaggaggcagaggttgcagtgagctgagatcaggccactgcactctagcctgggtgacagagtgagaccctgtctcaaggaaaaaaaaaaaaaaaaaaaagatgtatctttgaaactcttaatcacatttctaattgagtttgtgtattgagtgagcagtgggtccgttttcagttctttccttatggacacccattatcccagcaaagtttattaaataataatttactctgcagtatctgtctgtcatcatagtttccctgtgtgcataggtatccgttagttgttctctgtgctaaaaccacatggtcctgattatggtaataagtctgtttaatagggcaggcccaggccaggtgcggtggctcacgcctgtaatcccagcactttgggaggccgagaccggcagatcacaaggtcaagagatcaagaccatcctggccaacgtggtgaaacccgtctgtactaaaaatacaaaaattacctgggcatggtggtacgtgcctgtagtcccagctacttgggaggctgaggcaggagaattgcttgaacccaggaggcggaggttgcagtgagctgagatcgtgccacagcactccagcctggtgacagagcgaggctacaaaaaaaaaaaaaaaaatagggcaggccctcacacctggttcttttctggagggatctttcctgttccaaatgaaatacagaaatggcttgtcaggttgcaccaggacaataagcacctcccaccactgagattttgactgggattacattgaacttatggatgagtttgatggaactggcatttttatagtagagtgtttttttcctccatgatcatggtatgtctcttcatgtattgaggtcctcttcattgccttttggtgaagttcagttttctctataaaagtttttcatgtttttagatccattcctagtgaatttatatttttttgctatgttataaatgataccttttttgttgcatttttaacagtttcttcatggtatgtggacatacagttgactttggtctaataactaacatttttttctaagtaatttgggtattacctttttttctataggattacatcccagtagaccaagaagagttaagagattatgtcaaagctaggctgaaggtcttttatgaagaagaacttgatgttccgctggtgctgtttaatgaagtcctagaccacgtgctgaggattgacaggtgggcttttttgttgttacagccccacctctcgcctaagctgctcttgagtaagtgtgtgtgccgggtcacaccaggcctcatgctgtcctaccacctccacctcagccttctccaccaagcagcttcccccttctcttctttctaagtccagcttaaccatcctcagtttatcctaagcagaacttcattcttcctcccccagcactgcatacctgccataattatggccctttgaccttctgctggaattgcattagtctctcatgtcagtctagaggacaggaccgtgtcttactggtctttgcattcctcctggacttcacaaataacagttgctcagcaaatgtttaatatacaagttcaagttaaaacatgtccaaaatactgtagacactagatatgagtcaaaaggggaatgaggcattataagccttaacattgatcagttctcgtaatgtttcagaatattccgtcaacctcaaggccacttgcttctgattggtgttagtggagcaggaaaaactaccctgtctcgtttcgtcgcctggatgaacggtttgagtgtgtaccagattaaggtgcgtctggtcggtggcctcttaatcccagcaacagatgtgtgtgcagagctcagtgagtaggaatggacctaacttgcctctgcttctgtaggtccataggaagtacacaggggaagactttgatgaagatctacggacagtgttgagacgttctggctgtaaaaatgaaaagatagcatttataatggatgaatctaatgtgttagattctggattcctggagcgaatgaatacccttctggccaatggagaggtaattaggtgacgtgttgcgttgcattacgtgttaccgggggaccagtaagtcagcactgtgctgtttcccaggtgcctggtctctttgaaggagacgagtatgccaccttgatgacgcagtgcaaagagggggcacagaaggaaggcctgatgctggactcgcacgaggagctctacaagtggttcactagccaggttatccgcaacctccacgtcgtgttcaccatgaacccgtcctcggagggactcaaggaccgggcagctacatcaccagcacttttcaacaggtacgtgggcctttacttggctctgggtcaggaaagtcggtgtccttccaagggacaaagcctgcccctcatagctgtcctgaaacatgggcctctttctcaggtgtgtgttgaattggtttggagactggtccaccgaagcactgtatcaggttggcaaagaattcacaagtaagatggatctggagaagccaaattacatcgtgcctgattacatgccagttgtgtatgataagctgccgcagccaccatcccatcgggaagccattgtgaacagctgtgtgtttgttcatcagactcttcaccaggtgggttcagttttgagatcaacagataaaccacaaaactaaccatcatgctaatataaaactaaattgctataaaaatagaccttaaggccaggtgcagtgactcatgcctgtaatcccagcactttgggaggccaaggcgggaggatcacttgaacccaggagttcaagaccagcctgggcaacatggcgagaccccatctctacaaaaaatacaaagaaaattagccgggcatggtggtgggcacctatagtcccagctactcaggaagctgaggtgggaggatcacttaagcccaggaggcagaggttatattgagctgagatcacggcactgcaatccagcctgggcaacagagcaagacccagactcaaaacaacataaatagaccttagggcacttcatgtttgacattgtactgttatttgtaaaggaaatacttgtttcttacctcttacctctttagtaacatctcattcttgtcactgggctgtaaattctggagccgtctaacactttagtgcccccactgactctgcctctgataaaatgatctcctttgcctttgtctcccactgctgctgtatgttcaggcccttactctttcctctagatcaggaatcagcacgctttctctttaaagagccagatcataaatgttttaacctttacaggtggagtagtctcgggcacagctactcagtgctgccattgtagggcaaaagcctccagagaccatatataaatgaatgggtgtggctgtggccagtaaaacctcattactgaaaaatgcaaggcttggcctgctaaccatgttttgctaatccttgctgtagattctgtgtgatagaagaattcagtctactcctccctcccagaagagctttgtgaaatccactctgagcttgtaggtgtcctgctgcccagcccctgcaggccatctccattgcccttggaatgtcgtccagccctggcttcccctggtagtctgatcatcttgctgtgcttcagaaatcaagggaccagagcagtttctcacatcaggcctgccttgcccctttcttgtcatttcttactaataaaaggtggaagcaggctagctaacctttctatagtaactgacatttgtgatgccttttcacataagtacacctctaaagttggtgtaatcaccatcctcagtttagagaagttaaagggcttagagaggtttggaagtgtaaggggtatctcgaaagctctaagtggctaagctgaggcccgactcgagtgttctggccccgagggccaggctccttctatcatgtcacacccatctgccaaggccaaaattgttttctgaggttaagtcacagagtttcctgaagagtgagaagatgtaactattttctgaaaggcgaatgctcggctagcaaagcgaggcggcagaacgatggccatcacccctcgccactacctggacttcatcaatcactatgccaacctgttccacgagaagcggagcgagctggaggagcagcagatgcacttgaacgtggggctcaggaagatcaaagagacagtcgaccaggtgcgtcacaggcacaaattcctcacgggagtgagctgcagtgaggacccctttccatataatttctgcatgtttctcgtctctgagtgtgggctttgctctttaggtagaagaactgcgtcgtgacttgaggataaagagccaagagctggaggtgaagaatgcagcagccaatgacaagctgaaaaagatggtgaaagaccagcaggaggctgaaaagaagaaggtatggtgtcagggaattctggcctgtaaggactgagcattttcagtctccaatgagagagtaggaaatgtagttccaaatgggtcttagggttagagagagggagggagggagagagagtgtgtgtgtgtgtgtgtgttggcagagtgaagaatgttgtttagaatttagtcagcaaattaaccaatgcttaacccatacctaagccatccctcctttctaggttatgagccaagaaatccaggaacagctgcataagcagcaggaggtaattgcagacaaacagatgagtgtcaaagaagatcttgataaggtggaacctgccgtcattgaggcccagaatggtatgtaaagactgtcagagctttgatgtctaggaagggtggtctccgtcaacattactgtggagttcaggtcactgaacattgcacatatgcttccctcaaaggttctggtttccaaaaatatcattagtaaccatctgaagctttttctgaatgcttgagattgtcttcatctctcaaagcaaagttcctacaaagctagattgtatttaccatagtgaaacccctctcataaaagaaacttcacaatataagctttgtgtcaatatacgtttttagagatctgttgataattacgtaagtatgctatttatcaatccctgacttgaatttcacccagaaatataaaatattcagtgtaactgtcttgtaattgtttctgagtgttctagctatgacccaattgctaatttaagtattgatagcagtcacttctctttttccattccttacatgcctataagatgctatagaaatagggcaacaacctgccatcctgttttagtttgcaatttacacagtgagtaagactgctctcagccaggcgaggtggctcgcactaatcccagcactttgggaggccgaggcaggaggatcatttgaggcaggaggaccatttgaacttaggagtttgtgaccagcctgggcaacatagctagacccccatctctattttaaaataaatgaataaatgaaaacaaaagaaaaaaaagagtgctttcttcttgcccactgtatttaacctgtttcaaataacccaattatctgtagtttttaccttatacaacaagatgaattcaaatgcaccactcaacctatatattttcattcagagttggatttggatgataatttaatgtagttctcaccttctaaatattacttaaaattgttttacaaaaatttcagcctagaaaactattttagtgtatagaagtcattggccattgtttttgttttgctttgtttgagacagggtctcactctgtcccccaggctggagtgtagtggtgcaaccatggctcactgtagcctcagccttccctgtttcagatgatcctcccacctgagcctcctgagtagctggaactataggtgcgcgccgccacacccagctaatttttgtattttttgtggagtcagggttttgccatattgcccaggctggtttcaaactgctgggctcaagcgatccacctgcctcagcctccagaagtactaagatgtgtgagccactgtgcctggcagccattgttttagaactgttaactccacgtctttacgcatccctctaaattgtagcaaatttaaaatgtctgttgaaattatataaaataaatgcacaattgcacttaaaatattttgtaaaatatttttttaaaatatttttggccaggcgcagtggctcacgcctgtaatcccagcactttgggaggcaggggcgggtggatcacctgaggtcgggagttcaagaccagcctgaccaacatggagaaaccccgtctctactaaaaataggaaattagctgggcgtggtggtgcatacctgtaatcccagctgctcaggaggctgaggcaggagaatcactagaacctgggaggcagaggttgcagtgagctgagatcgcaccactgcactccagcctaggcgacagagctagactcagtctcaaataaatagtaaatatattcttaatctttatggggataaagaaattaggacttgtgagacattttaaaggtaatatcctgctttttaaggaatgctagcattttgtaagatcttcataatcatttaagagatcagctacttaccctattccagagggtttaatacagaaaagtctctcatttcttagctcttctaagcagctagctgtcctttctctcattggagttggagctcctggctgttttggttcattctcaccatgctttgctctatcttctcccacccatcgaccctcatccactcctgctgccactcagctgtgaagtcgatcaagaagcagcacctggtggaggtgaggtccatggccaaccctcctgctgctgtgaagctggcgctggagtccatctgcctgctgctgggggaaagcaccacagactggaagcagatccgctccatcatcatgcgggagaacttcatccccaccatcgtcaacttctctgcagaggagatcaggtgagaaagtggaagtgccaaggtattgccagaaattgaaatcagttgttcaggccaggcacggtggctcacgcctccaatcccagaactttcggctgttcaggccaggcacagtggctcacggctccaatcccagaactttgggaggctgaggcaggtgaagtgcttgagcctaggagttagagaccaacctgggctacatggcgacaccctgtctctacaaaaaaatacaaaaatgagctgggcggggtggcatgcgcctgtagtcctagctacttgggaggctgaggtgggaggattgcctgaacccaggggatcaaggcttcagtgaaccgagatcacaccaccgcactccagcctgggtgacagagaaaaaccctgtctcattaaaaaagaagaaagaaaaaaattgttcaagtgttgagcacattttcagctttcacctgagaaccaagggtcagtctagctcatccccagtggtcagtcactggggcaatgagatgggagctggctctggtctcttccattttaattttatgaaaactcttccttgcttttgtcctgcatgtgtttagaaatatcattcgtcttttacagtgacgccataagggagaagatgaagaaaaattacatgtccaatccaagttacaattatgaaattgtgaatcgggcttccctggcttgcggccctatggtgaaatgggcaattgcacaggtgattaacacagccaggagctcccgtgtgaaaggtgacctcttttcctgtcacttaaataacagttatcaattggttcttcccagcttaactatgcagacatgttaaagagagtggagcccctacgcaatgagctgcagaagctggaagatgacgccaaggacaaccagcagaaggccaacgaggtggagcagatgatccgagacctggaagccagcatcgcccgctacaaggaggaatacgccgtcctgatctcagaggcccaggccatcaaggcagacctggcagctgtcgaggcaaaagtaagattatcatcattgatcctcagcctttcctgctgtggaagcagagattaacacacttcaacatgcgctgcatgcaccatgctggcctcggtgaattcgctctttaacatctgtaaggccccggaggacttttttcctggaaaataatacacactgagtagtcactaagtgttgttaattaggatagattgatacaaactggacacttttcagccgttgaatcccccaccagcagctccagacctgtttgctctgctgcctgagggcctcgctccgtacccagcttctgccccgctgagattctgagtcgtgtgtggtcattagttatatatgatctgggtctcatctcctctgggactgtgaacaacttgggcacgtttctaacccacccaaaaccctgcacataatgtggatgaaccgatttgcaggattcggtataaatcctgaaaggcctcatccctgagcatcttgttcggttttccttttaggtaaaccggagcactgctcttctgaagagcttgtctgctgaacgtgaacgatgggaaaaaacaagtgaaactttcaaaaaccagatgtccaccattgctggggactgtctcttgtcagctgcgttcattgcctacgcgggttactttgaccagcagatgcgtcagaacttgttcactacctggtcccatcacctacagcaagccaacatccaggtgagaatcacggggagttcaaaaaggatgtgcgagcagtgtgaggcaagctggtgtttagtgcacagttagagtcttgagaacagtcccatctgtggctgtgaagaggaggaaaggtaacggccttgcctttcagttccgtacagatattgccaggacggaatacctttccaatgctgatgagcgtcttcgctggcaggccagctccttgcctgctgatgacctttgcacagaaaatgccatcatgctgaaacgattcaataggtatgagctcgggtgccaaggagaggcatgggaggaatgtgggtggtgatcttgaatttttttcaaaatacacccttgtttgaagagaggaatagaaaatggggcgtgggcatacagtgctggcagcttggtgctcctctgatggtggggcgtgtgctgttctcgttattgtcaagtgtctgagttattctgcagtgaatgcttcttgtaaccttctaaaatcgattggcaggggccaggcacagtggatcacgtgaggtcaggagtttgagaccagcctggccaacatggtgaaatcctgtctctactaaaaatacaaaaaaattagccaggcgtggtggcatgcgcctgtaatcccagttactcaggaggctgagacaggaaaatctcttgaacccaggaggcagaggttgcggtgagccgagatcacgccactgcaccccagcctgggcaacagagtgagaatccatctcaaaaaaaaaaaaacataaaaataggccgggcacagtggctcacacctgtaatcccagcactttgggaggccgaggtgggcagatcacgaagtcaggagtttgagaccagcctagccaacatagtgaaaccctatatctattaaaaacacagaaaattagctgggcgtggtggcaggcgcctgtaatcccagctactcaggaggctgaggcaggagaatcgcttgaacccgggaggcagaggttgcagcaagccaagatggtgccactgcactccagcccgggcgacagcacaagactccgtctcaaaaaaataaaaataaagtggattggcagggttgtgtttgggggtggacattcaaacaaacagtcctctgttacaagaactgaaaatagctagttaaaggggaagtactacctgtttttctgcttaggaaagacagaataagaaatgggatgtaactgcagtgaagatgggctaggtgccgagagggttccacgtctcaccgggtggtgccagcaagagtatgaatcaatcagtacagcctgtgcgcagggctggatttgcctaaatgaccctttgacctaggagttccacttctaggtgttcattcaacagtagcctggcctaggtacagaatgtgtgtaggtaccaagtgtgtaccagctgaagactggagataactcagatggccctcctgagggcccaccacgccgtggtgctgggtagtctttgccaacacaggacattcgaatacaggctggacaggtgcagagcggacagtagaggcctcccacgaggccacaactcccacactgacacatgtgtctgtaaatgcttagaccttctctgtaaagacaggcgaaaaactggtaaaagccatcacctgggcaagggactttggtgaccaaagaatagggtcagaaaggcagggcagcatggttcttctcaccatatgcccttttatagttgagttttgtaaaagcttgtgtgtatattaccagttgggtttttttttaacgttttaactggctagaccgtaggtagatcacattagcttatttgtgtcctttcctcatttgtagaatggttcgataacagtgtcagcctcatagggctgttatgaggattacgtgacgtagtgtctgtaatttgacacggtccttggcaattaaaattctgtataatgttaatcccttgctgctgcgacatcattgatgttgatacgtgctgtctagaaggatcgtaaacatgaaaaagctattctaacagtgcaggatgctgagaggatgattgtcccagaaggaaaaagatttttaactatggccctcttggtgtatgactcaagctacctcctcatgccaatagttgttcaaaaggatgaggtgatgttagcattaagcatgtaagctttattggtaaacctgaaaacgtctccggaaaccactctcgggtggtggtaacagcctatcaatcagggtctctcatcagggactcggctaaccgtgatcctgtgctttccccattcggtgtttcaaccttctcttctgtggcctcatcctcaggtatccgctgatcattgacccctctggacaggccacagaattcattatgaatgaatataaggatcgtaagatcacacggaccagcttcctggatgacgccttcagaaagaacttagagagtgcactgagattcggtaacccccttctggtccaggttggtgttggcctttgaattcttgaaacactgcattcaagagtgaattcctttttgggggctgcctttagttttcaactttgtaagacttcattttgtatcagaaggataaagctttgcggtggttctgtaatagataaattcaacagaatcattatttgcatttaaaattctattcagtggtcgggcgaggtggctcacacctgtaatctcagcactttgggaggccgaggcgggtggatcatctaaggtcaggaattcaagaaaagcctggctaaaccccatctctacaaaaaatacaaaaattagctggttgaggtggctggcacctgtagtcccagctactcgggaggctgaggcaggagaatcacttgaacccgggaggcggaggttgcagtgagccgagatcatgccactgcactccagcctgggagacagaaagagactgtatcttaaaaaaaaaaaaaattatattcagtacagccataaaaagcaagaaacagccaggcgtggtggcttatgcctgtaatcccagcactttgggaggccaaggcaggcagatcacaaggtcaggagatcaagaccaccctggccaacatggtgaaagcccgtctctatttaaaatacaaaaattagccgggtgtggcgatgcacacctgtagtcccagctactcgggaggctgaggcaggaaaattgcttgaacctgggaggcggaggctgtagtgaaccgagtttgtgccactgcactccagcctgggtgacagagcgagactccatctcaaaaaaaaaaaaaaaaaagaacaagaaaaatgttcaagaaacaagaacaaggaacatgttcctttgcaggaacatggatggagctggaggccattatcctcagcaaactcatgcaggagcagaaaaccaagtaccagatgttctcacttagaagtgggagctaaatgatgagaacacatggacacacagaggaacaacacacactgggacctttcagagcatggaggtttaggcttataaccagggtgatgaaataatttgtacagtaaaccccatgacaagtttacctatgtaacaaacctgcacttgtatttctgaacttaaaagttaaaaatgtgtttttaaataaagcatgtaaggtcactaggaagcatcagatttgcaacgagatgaattcattatgcaaatggaaaaaaatttttaagaaatgaaataaaatgccattccaagggtctgtgtcagcactgtccccagaactttctgcaggggcaggaatgccttatggtccacactgtccagtgtggtagccactagccttgggggctactgagcacttcccatggctagtgtgactaggaactgagttttaattttttattttatgtttttttgagacagagtgttgctctgtcccccagtctgaacctcccaggttcaagcaattctgtctcagcctcccaggtagctgggactacaggcatgtgccatacacccccagctaactttcgtatttttagtagagatggagtttcaccatgttggccagtctggtctcgaactcctgacctcaagtgatctgcctgcctcagcctcccaaagtgctggaattacaggcgtgagccaccgcatctggctgagtttttaattttagttcatttaaatgtaagtagccacacatagctagtggccaccacacgcaagtggcgggtggcttttgggaaggtatgcttatccagagtaggacagcaacatagcatttgggtgaagataaagttacaaagccctgaccatcaagttccacccgtgtggaatgcaggatgtggaaagctacgatccagttttgaacccggtgctgaaccgtgaagtgcggcgaacaggggggagagtgctgatcactctcggggaccaggacatagacctgtcgccatcgtttgtcatcttcctgtccacccgggatccaactgtaaggaatgggacccttccccagggaaatctggcaggatgtggttttgaaactggattaagacagactgttctgttacctattttggcaggtcgagttcccaccagatctctgttcccgggttacttttgtaaacttcacagttacccgtagcagtttacaaagccagtgtctaaatgaagtacttaaagcagaaagacctgatgtggacgagaaacgatctgatcttcttaaacttcaaggtaggatctggacctgtggcttttagatggttggtgcaggggaaggggctgaacttttaagtgactaggatgttccacgtttgtggcaaacacttctgagagcataccttttgaaggattattgcaaactctggatgttttattcatttaaggggaatttcagctccgtttgcgtcagctggaaaaatctctactacaagctctgaacgaggtgaaagggcgcattttggatgacgacacgatcataaccactctggagaacctgaagagagaggctgcagaggtcaccaggaaagttgaggagacggacattgtcatgcaggaggtggagaccgtgtcccagcagtacctcccgctctccaccgcctgcagcagcatctacttcaccatggagtccctcaagcaggtgggtgccttggccatgcagagactggcgggccccgcacagtagctccttggccgcacagaggctggcgggccctgcacagtagctccttggccacgcagaagttcagcggggtgccgagggagctgcctcaccgctgcccactgcttcctttcagatacacttcttgtaccagtactccctccagtttttcctggacatttatcacaacgtcctatacgagaacccgaacctgaagggtgtcaccgaccacacacagcgcctgtccattataacaaaggacctcttccaggtagagtgaggtcctcagccgctccctggcgggggggaagcagggtgctgcttctcttatggaacaacatcgtctcctgctcttgtcccaggtggcgtttaaccgagtggctcgaggcatgctgcatcaggaccacattacctttgccatgctgctggcaagaatcaaactgaagggcaccgtggggtaagagcactcacgcccacaggaggatgccatattgctggtggcccccaagggtttcatgatcagatacatgcttttattatttcttttattttctcttttattttctttattttattttttgagacggagtctccctttgttgcctaggctggagtgccgtggtgtaatctcacctcactgcaacctccacctcccaggttcaagcaattctcctgcttcagtctccgaagtagctaggactataggcgcaggccaccacatctggctaattttttttgtatttttagtagagacgggttttcttcatgttggcagcccagcctggtctcaaactcctgacctcaagtgatccgcccacctcggcctcccagagtgctgagattataggcctgagccactgtgcccggcctgttttctcttttcttaaatcacagctgttatcttagtgacagtgggagtgaacgtgagagaccctagctaacctgttgcacccttcgcagggagcccacctacgatgcagaattccagcacttcttgagaggaaatgagattgtcctgagtgctggctccacccccaggatccagggcctgactgtggagcaggcggaggcggtggtgaggctgagctgccttcccgcgtttaaggacttgattgcaaaggttcaggcagacgaggtgattgttctcttgaatgttcccagtaggtaaatgttggccttttcccaggaaatgtaaggaattgcatgtggtataaaacccagaatgttgtgtctgcgctctcgcgtcagactctcgctcagtcgtgggttctgccccagaggccagccctgctccatgggtgcttccactattgtctccacagcaatttggcatctggctggacagcagctccccggagcagactgtgccctacctctggagtgaagaaacacctgcaagtaagccccactgtggttttctttctggacctgaatgtaaagttgggttttgctgcttaaagggatgctttcaaaaaacacaaagttactagcctgggcaacatagtaaggccccatctctacaaaaaataaaaccttagccaggcgtggcggtgcacacctgtagtcccatctactcgggaggctaaagcaggaaggtcacttgagcctgggaggtcgaggttgtgtgagctgtgattgcaccactgcactccagcctgggcagcagacagaggcctgtctgtgaatgaatggtcactgattcccaagataagtatttcaatgttaaaactttttaaggaaaccacttagggagatcgcttctaggtaggtgttggcttagaagtaaatcagaaatttccaattcctattcatctcatgcttaaagaccacaagagaactagatggggaactcctgcctaatgctaaggagttaactggctgtattcatgctgcagacaggaatggaatgccatcagccgtttttgagtgtgttaggccagaccctgggctagccaggctgagaggaagtgtcagactgtggagggcagagcgtggagcccccttcctgagtaccttcaggtgttctcaggaagtgagcaggtattagtttagtaatctaaaaatcagcaaatggcacctttgtcctatggatacatccaggtagtaaggtgttctcacaggcgtgtccagagggctcacggaaggcacagcagatgtggctgaatttcctgatttgagctgatcctgaaatgctgagcatttgctgagtgggtactttgggaagaacagtccaggcaggggagggcgtctctgagtccatgcttccacccagcacccacccctctgtacctgtttcagcacccattggccaggccatccaccgcctgctcctgatccaggctttccggcccgatcgcctgttggccatggcccacatgtttgtttcaacaaaccttggggagtctttcatgtccatcatggagcagccgctcgacctgacccacattgtgggcacagaggtaatgtcctggtacagcccgggcttcccacgagactccatgcccacctccccagccacaggtggcagcagccctggcatctgctctcactccgggctacagtctcctcctaagaccaggaactcgctgcagattctcaactcctggctgcatggtgcccacacctctgggcccagaaagaacatcttctcaggcccctcactcggggctctcctttcccttgacaggtacacactatttgctggcactgtaataacttctgccttctttgtttgcaggtgaagcccaacactcctgtcttaatgtgctctgtgcctggttatgatgccagtggacatgtcgaggaccttgcagccgagcagaacacgcagatcacttcaattgcaatcggtaaggatgcttgaggggcttcatgggctggagccctgcaggatttgtggtgggcattgatgtccgaggctgccgctgctaacactaagtttccctgcaccaggctctgcagaaggctttaaccaagcagataaggcaataaacaccgctgtaaagtcgggcaggtaggcctgttctctttggctgaagaaagccttagtccccaggcattcaggcaggcagcctggcatgctgtgtgactctcactttgtgtgtgcaggtgggtgatgctgaagaatgtgcatctggccccagggtggctgatgcagctggagaagaagttgcattccctgcagccgcatgcctgcttccgactcttcctcaccatggagatcaaccccaaggtgggtggttgaaggagtggagacgttgcaggctggcctggcactgtgctgtcggcacgtgtgtggtggaattgaacaggcgccctcatccacacccgagcataactggaacggcgctctcccttaggtgcctgtgaatctgctccgtgcgggccgcatctttgtgttcgagccaccgccaggggtgaaggccaacatgctgaggacgttcagcagcattcccgtctcacggatatgcaaggtaagtaccttgtcctcctggtatgctttccccatagaagctaaagcccagtcccatcaccaaatgcagaagtgggtccctgggcccccggaagtgccgtgtggtgaactgcacagctgcttttgcttttcagctgtaggtaaaatttccttccatggccgggcaccgtggctcacactggtaatcctagcactttggaaggtcgaggtgggaggatcacttgagcccaggagttcaagactgtctgggcaggccaggagtggtggctcacgcctgtaatccctgcactttgggaggctgaggtgggcagatcacttgaggtcaggagttcaagaccagcatggccaacatggtgaaactccgtctctactaaaaatataaaaaattagccaggcgtggtggcgtgcgcctataatcccagctactggggaggctgaggcaggagaatcgcttgaacccaggaggcagaggttggcagtgagctgagatcacatcactgcactccagcctgggcgaaagagcaagaccccgtctcaaaaaaaaaaaaaaaaagacctgtctggacaacatagtgagatcctgtctctatataaaatttccttcctttgagcaggttgaaaagtaaaagccatgtttgattatggggtgtgatgaggtcccagaggagcagagatgcccacggagaagctgggactcagagttgtgtccccaggtggcaggcaatctcctctcccccagcacaggcccccaagaccaaacagagccctcccaggcgccaagtgaagaccgaaactcttgggcgagaggagggggattgtggcaggggtttcgttctgtcaattctgttctattttgtgccacattcacgttttctgacattcttagaaactctgtcttctctagatttcttactggctgaataaattctgatggtctcattggatgacacgtctattaatagaaaagttggcatacttttctcctagcagcagtactcatgtgaatctgctgccatcgtcaggatgtggagagctctttgtaaagctttgactgacctggcatctgcactgttcttggcgaagtgctgttttctaatgactctgtgcttggtcactttcctcaccagtctcccaacgagcgtgcccgcttgtacttcctgctggcctggtttcatgcgatcatccaagaacgcttacgatacgcaccactggggtggtcaaagaagtatgaatttggagagtctgacctgcggtcagcttgcgatacggtggacacgtggctggatgacacggccaaggcaagtgtgggccatgccaggacagacagtggacgtgtatctgggaaggatgctgcagggcgtggtgctgagaggccagactctgcgtggaagagcgagctgacccctcgtgaccgccaaagcctagctggccatggggagtgaggaggaaagctgtgcccctcgaaaggaagccccgggcctgcccgcctctgaccacacacacgaaccctgcttttcctcccccagggcaggcagaacatctcaccggataagatcccgtggtctgcactaaagaccttaatggcccagtccatttatggcgggcgcgtggacaacgagtttgaccagcgtctgctcaacaccttcctggagcgcctgttcacaaccaggagtttcgacagtgagtttaagctggcatgcaaggtcgacggacataaagacattcaaatgccagatggcatcaggtatgctgctgcctgctggaatggagacagttgtgatgtcagggcgtctggtgtcactcagaggtgacccctgacatcatttccaaatgcactggttttctaggcgagaggagtttgtgcagtgggtggagttgctccccgacacccagacgccctcctggctgggcctgcccaacaacgccgagagagtcctccttaccacacagggtaggcaacaaggatcctccccacacgcagggtgggtggcgagggtcccctcacgcggggtgggtggcgagggtccccacacgcagggtgagtgtgcactgctgtcccagggccctccctggttatgctgggtgtggctctgtcagcctcggccttcctgccagtctccagctgctcctagctccactccgaggggaggcagaggaaagaactggctcttctctgcagcatcaactcagttctagagaaaaggcttgatatttatgtaaatgagcctagaaataacatttagatgttcatctcatattgaaaagcagttactggctgggcacactggctcacacctataatcccagcactttgggaggccaaggcgggcagatcactcgaggttaggatttccagaccagcctggtcaacatggcaaaacctcgtctctactaaaaatacaaaaattaggtgagcatggtggcaggcacctgtaatcccagctactcaggaggctgaggcaggagaattatttgaacccgggagatggaggttgcagtgagccgagatcacatcactctactctagcctgggcaacagagtgagactctgtctcaaaaaaaaaaaaaaaagccgggcgcagtggctcacgcctataatcccactataatcccagcactttgggaggctgaggtggatggatcacctgaggtcaggagttcgagaccagcctggccaacatggtgaaatcccatctctacaaaaaatacaaaaactagccaggtgtggtggtgggtgcctgtaatcccagctactctggaggctgaggcaggagaatctcttgaacccgggaggcagaggtttcagtgagctgagaacgcgccattgcactccagcttgggcaacagaacaagattctgtctcaaaaaagaaaaaagaaaatcagtttcttttttttttcttcaagagttgaaaagtacctgatattaagtgattttttaaaaccattcatcttccctagaattttttagcagtctttgtttccttttcacttacttacaagatgttttttaagacttcaagtgctgtgagccagaagggagctaagaaattctctaagccagtggctctcatagtgtggctcccaaaccagcagcagcagcagcctccccagaacttcttagaaatgcaggttcccagccgggcacggtggctcaagcctgtaatcccagcactttgggaggccgaggtgggcggatcacaaggtcaggagatggagaccatcctggctaacacggtgaaaccccgtctctactaaaaatacaaaaaaaattagccgggtgtggtggcgggcacctgtagtcccagctactcaagaggctgaggcaggagaatggcgtgaacccgggagggggagcttgcagtgagccgagatggcaccactgcactccagcctgggcgacagagcaagactttgtctcaaaaaaaaaaaaaaagaaatgcgggttcccaggccctgcccaggcgcactctatcaggacaggggatgggcccagcaactggccttcacaaagcctccaagcactacacgtggggttgacagcagctgatcaaatctcaactttttcttatgggaaaaagtcacgaaaagctaagaagacaagaaaagctaagaagacaagggcattgctgaaactcacagctggttaacaggacagaatcaggagggataagccaggcgagctgggcgggtctggagggaaagccaaagccaggcgagctgggcgggtctggagggaaagccaggcgagctgggcgggtctggagggagagccaggcgagctgggcgggtctggagcacactgcaggcaccacaaggctcggggtaatcccagccacatggtggcagtcacaggccaagggacactgtggtgaccagttttctgagttaagagggcaggtggcaccccctcctggagcgcctctcgagcacgcactcattcatggtcgggctgaaagccggccggggcttggcccaggtctcacagtgaacccaaacccagggtcctgaagagccttccttgagtctttggactcgggctgctggttccgtttttttttttttgctttgagactgagtcttgctctgtcactcagactggagtgcagtggtgcaatcagagctcactgcagcctcagctttctgggctcaagcgatccccccacctcagccttccaagtagctgggaccacaggtgccaccaccacacctgcctttctaattttttgtagagatgagggtctcactatgttgcccaggctagtcttgaacccctgagctctagagatgctcccgcttccgcctcccacagtgctgggactgtgggcgtgagccactgtggctgtcttgctggtgctgggactgtgggcgtgagccactgtggctgtcttgctgggtcagttttaacagtcatgttctcgacctggtaacaattcttattctgtatctgtctccttagctttctggtcaggccattgtctgtgctttaaaaacatacatgactggccaggcatggtggctcatgcctgtaatcccagcactttgggaggccaaggcgagcagatcacctgaggtcaggagttcaagaccagcctggccagcatggtgaaaccctgtctctactaaaaatacaagaaaaaattagccaggcgcggtgccacatgcctgtaatcccagctacttgggagcctgagtcaggagaatcacttgaacccaggaggcagaggttgcagtgagccaaggtcacgccactgcactccagtctgggtgacagagcgagactccatctcaaaaatatatatatacacacacacacacatatatatatacatacacatacgtatatatatatacacatatatgtatatatacacgtgtgtgtgtgtgtgtgtgtgtatatatatatatatatatatatgtacacacggctgagcaccttccagattttgctgcagttcccagtgtggactcactcaccatgtggcctttacgttcaagtcccttttccctctgtgatttcttgcccgtcccctccctccttcctgctgcgactgtgggactgtggcccaggtgtggacatgatcagtaaaatgctgaagatgcagatgttggaggatgaggacgacctggcctacgcagagactgagaagaagacgaggacagactccacgtccgacgggcgccctgcctggatgcggacactgcacaccaccgcgtccaactggctgcacctcatcccccagacgctgagccacctcaagcgcaccgtggagaatatcaaggtagctgggagggtggcgggccggccaggtctcaaggtcccaggtgctgggtatggtcatggaccattgttccatggaccattggttccactgtgccggacggaacgtactcacaccggtgtcacctcagagcaggtgtccagctgagcccaggcattgggcaagatgagttggcccttttgaaatggactgaaaacaccctagaagattgtgagataggcagacagcgccacagcgagcagccgcagcccttcctccctagagagccccgagagctgcgactcgggcaggggcctcagcgggtttctgagcagcctcagcttcacacaagctcggttccaagtcacgctctgccaaagctgtccgtgaccctggacagttcggaagctctggggctctccccggaggccgagttacttctgtttgacctttacactggagaaaggacctcttcctaacttctcttcacccttttgaacgattttaggatcctttgttcaggttctttgagagagaagtgaagatgggcgcaaagctgcttcaggacgttcgccaggaccttgcagatgtcgtccaggtgtgcgaaggaaagaagaagcagaccaactacttgcgcacgctgatcaacgagctagtgaaaggtgcgtgagaggccgaactcgtggtgtggcttccggcgggcaccttggccaggggccacaacccagcccagccacacagcaccacgtgcagacagccaggcctgcaggagcttccgagagcagctctgtgctcttaccctcaaggtgggcggggggaggggaggagcttagaaatgctgaagaatttgtttttcttctgtgctggttcactgaatgttgaccaaaatctttacacaacttctagttttttaggggtcttccaagacgacagtgaatggggaatgtggtggtccaggatggtgacagacggtagtaggttacggcctgtgaagaatgggtgtcccccaggacagtggaaaagcaggggcaggcgggcatggggggctcatccaaagttgtggggagcccccagcatcctcctgtttgccccaaaagccctaattgccaggaacactgagccacttgtgtgacatgaggttttagccgcggttttgcttggatgtgattatggtcctccagaaagacacacctggactaatttgaccctagaaactgcacggttctgagacatgctctggaccagcctgagctagagcagatgtggtgagggcggcgccaggggcataaagtgcagcctgggaaaggcagtaggtggagccgccagccgcctgtgtgggcagccaggatgcctagcacttgcacatttgttccatctgtgctgggggagttgtgagagctgacaccctgggctctgtgtgccttggctgcagggatcttgcctcggagctggtcccactacacggtgcctgccggcatgaccgtcatccagtgggtgtccgacttcagcgagaggatcaaacagctgcagaacatctcactggcagctgcatctggtggcgccaaggagctaaaggtgaaggcgctcctgacgagtctcgggtggtcagcagctgtcctgggctggggtgggagtggctctggggaaaaacacagggcccaggtctgacctgagctccttcccctgggggctgctgctttccacagaacatccacgtgtgcctgggtggcctgttcgtgcctgaggcgtacatcactgccaccaggcagtatgtggcccaggccaacagctggtccctggaggagctctgcctggaagtcaacgtcaccacctcacagggcgccacccttgacgcttgcagcttcggagtcacgggtgagtggagtctcacagaaaatactggctctttgcaggtgacctcggtggcctgagaccattgttcccagatacatgcacttagggtgaccggctggcagttgggtggagcctctgggcgccctgtgactggggtttgtgtagctgttgtgttcacctcagcctgggttttggcttccgcctcacaggtttgaaacttcaaggggccacgtgcaacaacaacaagctgtcactgtccaatgccatctcaaccgcccttcccctgacgcagctgcgctgggtcaagcagacaaacaccgagaagaaggccagtgtggtaaggaggcactgcctttcccaggcattctgcagggacccctgcggtaacaagggcagaggcggctcctcttctatgcctgggttccacttggaacgggaaatgaggttcacagaggaaatccatttcgcacctgtccaaacctctccttgccgggccccatcagctgtcccgggcagtcttccagttttcttacttttcccttaagccaccagtaaacccctctgcttctgcaggtaaccttacctgtctacctgaacttcacccgtgcagacctcatcttcaccgtggacttcgaaattgctacaaaggaggatcctcgcagcttctacgagcggggtgtcgcagtcttgtgcacagagtaaacttttctagctgcccctttctgtaatagtgaaagttggtatttaacatttattcatttttaaaatatttggaaggtctgagcttgtgaaaagaaagtggttggtctgaggttggaggaagctgaatggaatctgacggttgggagtggtggaaattggaaggataccaggaggtatttgggaaggccaatggcgtggctcctttgaggaaataaaacactaagcatga

SEQ ID NO: 8 - protein, 4646 aa, Homo sapiens [sequence omitted]

SEQ ID NO: 9 - DNA, 90373 bp, Homo sapiens
aacgtcacacccaggaaactttcaatatactttattaaaaagtttctttgtataaatttcctaaacattttaaaattaaaattaaatcccctccctccagcacacacaaaaaaaaaacacacaacattagaggaatgccaaaaatattctctattacaacttttttaaattctttaattaaggcattggtcccaacggtgcacatagattaagggattttgcttccttctgaactagatcatttgttagaggcttcagaaaaagaaaattagcttgaaatctagtctgggaaattgggggcagggaatgaaaaagttggtctcttgtttctccacgatacacaggcttcccatctaaagtcatgcttaactaaaagggaaaaaaaatgaaccaagcaaaagtatatagagtagccgtgacatttgcattattttctagactttacatttgcctgcaacaggcataacatgaaactccagagggaatttggattgataggaatgttcacataaacaccagcagtggctaactgttacacaacattcaaagtattcgagagaactgcctggagacagagagcgagggtccacagacacattagcaccatactgataggtcatgcagcaggatgttccctcccgagttcgagtgtaaatcaaagcatgaaatgatacagtgcaagggaatctacacccggagcttctacagagacaagttggcgatggctgactccttcttcttcaagaggtatatgatgttggccacccacgcttaggttcccatcacactgatgactccgggtttggcgagcactgagcgtcgagagagggggtgggtggggtgaggtgaggagccgagagaagagaggaaaagccacattactgacccaaaagggcactgtcattatcatgacacagtcccgcagcctctggtttccatcacctgtcccacttttctactcagtaccatcaaaggccctctgtgacgttcttggcctggggccccggggcccagggatgtctgggaaatctgatcccattcttttgccctgcaccatctaccaggcctttatacgaactgaactctccccattctggcactgaccccaggctctgttcaaagtgtttattttattaccagttgaactgcacaatataatggagatactggatggccccagtgacaacattgttatttataggaagcaaaactatttaaaagataaatttgtgggggttgtttatctttggcgttatctgtagttgttcattatattatcttcccaggaatcatttttggtgcaatattttacaaataacagcaacttagtaacatttctgaagaatgacaagggacaatatgtttttagaaacccaaaataggaattcaaaaagacatttcatgggttgtatttgaacgtcttccttatctgaggatacactttatcttctttttcacatgtatcataatcattgcacttctaatatttttcaaggtgacttattgacctgaatctcttatttgcagaagccataaacacaaggaagaatcacttaccaggagcgcaaaccttttcacattctttctgtgatccaaatttgttttcgtttccaccacaacctccataccagaatcttgcacagcttttggtgtttggatcatagtaccattttaatatgaaatccctgcaagttccttcgtctttcggcaacttgcatatatctttaataaaaacatgagaaaaggatattaatgagaacatgcgtgttactcggctcccagtgctggggctgacagtctgatgaccctactgtggcagaaggaaaaaaaagaagagcttccaggtgaaaactcccttaacctgctcaaatctccatttcctcactgccatatggacataggaattgcttacagccttgtgagagatagatgaaattatatcaatgaaagggcttcataaacagcactcagaatcccaaatgctggcaatggttattgaataattttaaatgaaatgaattgtttttcccctttccaatcactgggccatttgccctccaagtccttccatgttaaatccccagaaaagaaactgaattttaaaacctcagggttttataattcttggcaaaatggaaattcgattctgttgggatatagttcaaaaataaggctctacctttcattacaagccaagtagactgaaaattaaaggtaaagcagaaaagaaaatcctttatgagtgtgtgtgtgtgtgtgtgtgtgtgtgtatgcacgtatgtgtggtagccaagagcctttgtgacctgccaaatgaaacacgtaaaacaaagagctagcactgatgtaaaattcatgatggcaaaaatgtcacatagcagaactattttgaagacagagaagcattcttttcccagttaaggaagtttatgtttccaatgcacacgtctgatgtagcccagctgcaaagtaaagcaaaggtcccctcgacgcctggagagaagagtttacagttcacacacagcacgactcctgtttacagagttttctggcaaactccagattgttctgggaaagagaagcattgatgtcaactgttatctgtaagtttgaaaacgtaaaccttctttctccaaaactccctggagccaataattctgcatgttcctgtgagtagctaacaggctggaattatccagctctcccctacaaagagatgcttctccatctcctttgtccccagcgaggcaggctgctcacagctgcggaggtggtgagcatctgtgcttcagatagataccaaaaaggacaaggaaaacctaagtcttcagtggataatcatagcttggatcacccacgatggaccagactcaaaggtgcacaggactgaggctcagaattggtctaaaacatttcctggttgctgctgtcacccaaattccaggctggtggctggtggctccacagttacaacacctcctagttgcagacgctctcagggcccagaaagccagtggtccccacgagagcctttgaagactccaggaagtcagaataaaatgaagacaatttacaaaaacaaccttctttctctcaaatatgccaataactgaaggaaaatgcctggctgtcaaggaaggtcctggagagaactgacaaggcaaggtaatttaaccatcaaaatttattcctcatttactggtggcttccctgttagcgtgaggccggcgtcaaatgatctccctattcttccttccttcccagagcgttggccaatggaccctatttgctctattttatttgtttcaagtgcacttcagtcctgaccatctgtgtttagctgttcaattcccagtcccctgggctctgctgaaccagtcacgagaggtctgcccagagccacggacacccagcccatgagtggcctcacagcagcacactccactccccgtctgattggcttctccagcttccttggccctccaccctagccctccagttccacaccacggcactggtgttttctgcccttatttcagtgagagtcactactgagaccctgtaagatttactagtggaaaataaggacactgttactgtggacaagaagatatttggaaaaccaagagaaatatattagtgaggtgagaacccggcactattcaaagacaaaaacctgtacttctctacttctgaagcatgaaaacggaggattttatgttcttaagaaggcttctaatgcaaactccacataatcttgacttctgagacatgtcgttttggctggactctactcagctatgagtgcatatgttaaagcaactgttttaaagcaaaaaaaaaaaaaagtatttaaatgtcctggagtaccaagggagatggctggccctcgttgaacttaacctggacttttccctagaacgacacgtctttggatgcaatagttgttcatcttttccctctgaaatcagtctgccccccaggtataacctgtaggaagctagagccttctctttatgtgagaggagcgcatggctgagtcttccttaatttgctcttctttattattgagaacctagtgggagcctaaaagacaatggggactgaaaattatccacaaccttccccggcttcctaacctagaataccaatgtaactaagtttgcttggaaaacagagaggggaaaggctgcctgactcagaccactgtctgctgaaacttccttactattggtcactgggcttcaggaaagtaaccaaatagaagagaggaaatggaggcaagcacaatgttaggttaaaaccctgttctgggaatcccacctgttcccagaagccacaggtgcctacctagaacatcctaaaaacaaccattcaaaaacactggggcgcaaggcaccctaagccccacagtccatttttgtaataatgatgtgcaggagtggatgtgcatgtgcgatgcatgcaccttcccacaagcaataatattcatagaaaaaaataggaaggctatgcatcgggtcactattggttttcatcaaaagccagcaatgctgtcacaatgagaatcgtgtaatatatttctctgtacctcctgaatgcttgacaatgcatatctgttaactttataatcagcaaaaaatatatgtattcttcaaagtggaaaacatattgattggaaaatcttgtctttttcatagtttgatattcccatagtgtttcaatgcatttttaaaggcatcagctttgacatttcccaaacatattgatttccaaatcacgatgtaagtacttccttgagcaaactgaaggaagacagactgagaggtgtttatgctgcaatcatcaacatgttcctcatcagtttaatggtccccaaaacaagaaaattcaatcaccttctcactcggcattgttgttacagtataaagtacttccataccttggatgcaggtatgatttgcctgaatgaaaacactttccgccgtctacattttgagcattggtcagttcaaagggtaccaaggaaacttaccaaatttttaacttacttaatttatttacttatttagatactgagtctcactctgttgcccaggctggaatgaagaggtatgatctcagctcactgcaacctctgcctcccaggttcaagtgactctcctgcctcagcctcctcagtagctggattacaggcatgagccatcatgcttggctaatttttgcatttttagtagagacagggtttcaccatgttggccaggctggtctcgaactcctgacctcaagtgatcctcctgcctcagcctcccaaagtgcagggattataggcatgagccatcacacccggccaatttttaactttattttaaaatgtagctgtggttaaattttactctttcagatcttgaccaacagacttctattttttaagacttcaagataaaaaacactcctttgggctcatcataacccacacatgacaactaaccagaaaacatcctcacacagcgatgaacaacagacagcctggagaggaccatttcctaaatccctgtagctatttaacttacttcagctgtgggattagtttgttctttaaattattattaacataaagtcaggtatttcccccaaatataccattttatgctaattgatgatatatattcacatggaacatggccaaccaaatactgtattgtatccaatataagagctcttaattttatgatgcaccattattttatgttccactaagtaacacaaaatgctaccaataaaccatgatatattgtcaattctaagtcacatttcagtttcagaagtgtcccaatgagaagaaaattgtgcatcttagaatcaataagtaaaacgttagtaaacacaaaatgatggttccttcagggctatacaattggcccagtcatgtctactcggacaaaatgtgatcagttctacagattgctaatttcaagaataaataataaaggacatggtgattttgttagttgttttgtctagtttctgcattgaaacttctttaacacaggtgattaagccaataatttaggattcattttgcaatactgcaaaaagtaaattttaagttagatttttgttgttgttgttgttgtttagaaattctagacagtcttagctttaatagtaatatgcatagaaaatatctatccaaagcttccttagctaaaaatgagaagggagaagagggaggtggtaacaaaagcctgaaaccaaaattagcaactacgtagcactgtcaaaatcagcagcgacaaagcaggtggcagaaaggcccagcacacccatgctttcaggaggccacggtaacgaatgaaagatccactgctgctcactgccatttacaggcagcagatgtgtgacagaaaagtggctggagcataattcttttagatgccgagcaaagcaaaaagtggagtgagatgtttttgtgggggttcatttggttttatttaaaaaaatacaaatattaaccactgaaaatcaaatcatgtaatattgtaaagctggaatcctgagtggttgctaacgatgccctaggtatattaatggaatcaaggcctgttaacagaatcaaccttcatctcaaaggcgagagtctccctgccacataccaaacagggccagatcttatggaggacaaaaaatgccccaaccagactgccctcgcattacatgcctgactcacattcctgataaacaagcatctattcaatgtgactgtcaaaatgggcaaacattaacatatgcaaacgaaaaccaatggtaacactggtcctctcctcttcccctgccttaggtgcccaggactaggaaccttttcatttcagagtgtttctacctacaaattccttcacagattcaaacacaggtcaccaggttcccagaatctaacatgataaactatgaaaaatacagattcttaagacagcatcttttattcacagaagtaaaaaagcaaacagtagcatctactatttaatactaagaaagggacccatctctgtaaacatgtttctaattaatggatgctgcagaaagtaagaggaatgaaaatggacacatgtaaatataaaaaatatatttttaaaacttcattttgcctgaatggtctagaaaatgtatatttggagaaataatgcatatcgtggtcattggaatttggatgcaaaatatacatgcaactactgagtaagcatgcagttattatctttttttagttatttaataaagagtggttcattgtcactccttttcctatatccaaatatataaaaaccattaaaaaattttccccccaccccaggggaaatagttaaaatgacaattataggagaaggtgaggaggggagggagagaggttggtaggggtggggaggataaggattcctctcctaattctggttatccattttgaattttagacatttttaagtaaatgtcccatttattaggtcggtgcgaaagtaattccagttgttgccattactgtcagtggcaaaactgcaattgctttcgcaccaacctagtaattcaaaaagagctctcaaaaatgccataactgtgtgtacaccaacatatattcatcaggccaaggcaggttaagtgcttgtttgttactatgaagtcattaagtttaagagatcagagatcaattatgcagggccttgttctttttttaaaaaaaaaaaaaggtaatttatgtcttcaccctgggaaggaaaacacacatatgcatgtgtacacacatacatacacagacacacacacatgaaatggtgagaggacattcacatcctgggtctgagggttatgccccaattagtatgaaggagaaaggttttatttagattcatctgtatcaactacttgcagccttgaaagaaacacaagccccaatttcaaaagctcttttctctttatcacaggtagacaggcgatctcagtgttaaaggtctggatcaaaagcaccttcttaattctgaacctcacaactctctccccccatctctctctctctctctacatatatatatatatatatatatatatatatatatatatatatatatatgaaaagaaaaacaaaacagcccagccagacccttgctgaaagacattgttgtttatatgaattaggcactgtttatacaatcttgtcccttttggaccacacataagagaatcaaaaacatccccaaatcttgctgtctagtttactcattattgatctctgatctctagtttactccaagtctttttctctcaatgaagcactaaattggctaaaatttttctatttcccacactgtattcagggagaagttaaccaatgagtgagaaatgacatacacagatttcagcaactttgaagttagagttgaatctgtcctgacccacacctttggggaaaatctactgtgttctttgtggcttctctttgagctcaagcaccatggtggggtcgcctaacaggctcactcaacaaacacctttaaaatcaattacagaaatgagcattgtgaagagaaatgctttcctcctcctgacagtagacgatacaccaaaaaataatgaattgtcccctagttagcagaaagcttttgcttcaggtgtataaaacagtattatatctaaattcccatggcatttccattttttatgttagtaccatcattctttgctgaacactcttaagcaaagcctatcaactattttaataatcagtttctcaccgatgaacaagccaagtccacattctgctgaatgagagattccaggtctctcagagtttcactgcccaagaacaaaagcaagtaacagctgtcagttcctgaattacacctaaccagtcactaacttagcatagactatgcacacactctggggttcaagcacatgagagacagtatcacagactcacacactaagctggggtgtgtgcttaggatgtccggaccagaacaccccatgggtcagatccaaacccatgcatttcatggattccagccaaatttgtcttgtgttcttctaagcagtttttttattagattaaatcactgagtaaatgaaacgccaatcttcacagcatcacagaccacaaatcaactcgagtcccagtatgaggcacaggagaaatgtctaatggatacgtgaattctagtgatagccccaaaagcacctcccatcaaattttcactgagtctgatcacaggtaaagtaagactccatttacacctgggattatgcagaataagatgatgttgggctgcacagagctgacgtggaccttttcccccatagaagtcatgcctgggctaagacttagaacccaggaagttaaattggaatcaagatgggtattttcttagtgccattaatggacctaatagtttcacaactcacctgtttcagtgagagccaatggttctgtgctcaccattagattgatggttgaactagaagctgaccttgctggctgtggaggtgggggctgagatttctctataaaagaaaaatatatgcaactcgtaggtaaatcagaaacaggagggcttgggaatccttagtgactgatataaggttgcctgctgtgattaatgtcttatgttggggagtggtgattgaaagacacagatccaagacacctctacatccacgacttatgctgtgggctacaagttggatccatgagctaataagcgacgggaggggatccctgaacttctgaacaaatcctctcacttcccagacagcctcttctgctgctgtccaggaaaatagagccctagggttgactgggtctttggactcatatctctatgggcctaatccatggcactggtgggaattccctttcctcaagctggttccttgatctgaatagcattggcctgaagaaaagaggagccttcccttcacattcctggagcagtgggggtcaagaagaatgggaggggggaacccagaagaatttagaaagatgagagaggggaccatgaataattaagaaaagctgtgacagcactcaagtgcaggcctcagtgaaatgggggggcccctggggacaacagccagccaagggcagagcccaactatggtgagatcagggcagggagactcagctatcgacatcctccacccccggggcggtgagacttcagggacacctccattactccctaaggagccagtgactggctggtgttttcctgaacatggaaacctggacggggtggtgggcaaccaggagccctcaccgggagacgtggccatctttcccgggtgcaatgttggaaagggctgtgctcaggcgacgtggatctggcttcctccaaaaagtagcccaggacccagagggcaggactgcatcccacatggaatcccatttccattctgtgttttataagcttaggctgccaccaaagcacccaggctgagttgttttgttgttgttgctgttgttgttttttgaatttgtggttatttcagaatagattcaataagtaagtgtctcctttgtgtcctatttgatactctacatagaaatcaggtaccgacttgtactgatcatgtacttacttgtactgaaacttccgtggtaggtggctctgacctgagacctcaggtagcagaccacagccacatggtatgtctgcccagcgagcaggcctccaatgacgcggtccgtgaccgtgaggttctgcttcagaaccagggactgatcatgggctgaggtgacggtgaggtcataaaaataaggaccggggggctcagccctctcccagtggagtttggcgctgttctctgttatctcaaacacctggacttcacgggacatcttaactgaaagatagatcagagcgtgaagataaaaaataaaatcctccatgactgtagtgcatgagcgagagaggaaatctgaaagggatgtgttaacagacaaattgacttgaaatttagctgaggcggggaactaatttcttgttcaagcccctaaaaaacattgctcttataatctatcagcatacatgaaatgtgaaattcacagtaatgaaaaatctcattattcatcaacttttttttctattaaaaatctcgcctgttaagaagatactttggaaatgcagcatactaatcctaagttgtgtttgctacaaaatgagccccataatttaaaatatattaagtcataaaattttagggtatgacatgaaattcttttaaaggaattctgctttctctctcatactgttcatcaaatgaagataatttccattttatcatgagccttcctttacagcttgtgacattcggtagtgtcttccagtatcttctttaggaaaatgataaaataacatactcttggtctcattaaagccatctaccttttgtatctaattcagtctgaaatatattaagttggtgcagagtcattgtggtttttgccattgctttcaatatttttctcatggtcagcatgagcatagatttgagccttggggaatgactgatggtccaggctctgacttttcaagctgctggactgaacacccagtattgccacagcacacagcttagggccccttttctgtgggtatgaggcagagacaaagtttgcagttgcaaagggctcccccagaccttttcaaggcatgttctaaggtaggcgagtccggctccatacaccagcccagaaacatctgccttgctgcctaagaaccaactgcagcgtttttctttctgtctctctcactccctaaataggagctaaaaccttatttcaacacggaaacttttccctttagtttaagacaactcaattttcaggtgaggtgaactgtgcccccactgacattccagagagaatgagagcttcccatccctatcgcaagacaggattgagggcacaggatggggagtgggaggctggaatccctaaccaacacctcttaaaatacatcatccaggtgtacaagcccagatcaaggactgtattctgagtgtgttacatgcaggctttgaggaacacaccctggagcaggaaatgaggatgtcacaagatggcagccctagcaagggctttcttacccatgggcttagtggtggctggcttggtggcagctggtttggctgcctgtggcctagggacctcaggcttggtcgccactggttttgcagcagcagcagcggggggtcttacagctgctggctttgctgctacaggcttcgctgccgttgctggcttcaccgccactgggggtctaacagtggccatctttgtggccacaggcttggcagccacaggtttcgcaggggccggctttgcagcggctggcttcacagatggctgatttataatagtcacaggctttgttgtggtggttacaggctttgttgtggtggtcaccggcttcgtcgtagtcaccggcttcgttgtcgtcactgggttggatgtaggacttgaagtaacgttattcggaacatttctgttaagacaaattaaatattacctctacttttacctgctatctaaaataaataaagacataaccccatgagctacattaaatttgttttagcaaaatgcatgcaatagtttttatagattatgtatagcagtgcatatattaaattccttcttttaaggatctgtgcctccctaaaaaaagatatggaacagcatattgaaaaatagaaccattaaaaatgaagcttatattgttctacaaaaacatctttcaatttctaaaataaaggcagagagaaaataagagacaataatgaataatatccaacaatgttctcattatagcaattaaccaaccaaaacatacaccaaaaattaaatgaaatcagtagttagctacttacattataagaaaatatccactcaatcaaatgctatgttgagctggaaaattataaagttagcatgtactattttgctcccagggcttattactgggagtatatatattttttatttctcttaatttttgtgtatgtgtatttttttttacaatttcttgatctattaccaatatctagagagaatagcagcctaatcaaacagacataacaacaaggacccacacttcatagctttcttgatcttagaagaaaatatattattttatagtcatatcttgctacttgtcctaggaagtattaatatattttcaagttaatatcataagacttcaaatactaggttacttcattcattctgttttcctaaagataaaaaggttgagccaatttcagggaaggtttcagagaaaaaatacgaatcattagagcctagaaaaatggaggctacaaagctaaatgaagcatccagtgccacgataagggtcctagtggccttagcaatgatattcattcttgctatgctgagatttaaagccactccttctgaggtcaaaagaaagagctgaaggacttaagtggtgatagacagaagggtctgcagtaggaagagatgggctctctttccccatcttgagagtcagctagtcgtaagccagatagtcatttttcaaggatcatttgcgttcacatctcatctgtgtacgaagttcagaatctgcagaatctgcacttccctccaaagcatgacacactgtgacattctcttaaggagcacacattgctgacacgctgcaggggctcagttcttgcagccacatcaccccagctagccctctgttacatgcccccactgccctctttgctcctagggttggcacccgagatggagcagggcatgaaacacggcacatgggccaggcagcagcatcggcatgggtgccacagtcctgcccactcccacccctcccgtcagtcttcatagaacatgcacatgacttcctattattaccatcattacatgttatcacagcattaataattttaagaagacatggagtctattttttgatgtatccaatccttcttttacgtaatcatttcacaccagatacggtaaattgtttggaactatggtctcaattatctaccttctctctgcccatgccctttcaatgtaatgtggcaagtccttccatcaagcctagttttccattcttaaatctaggttagcctttggacatgctttggtcaatagaacgtggcagaagtaacagtgtgccagttctaacctaggtcacaagaggccttgcacacttgtcttctctcagggaaccctgccaggtcacctggtgaacaaacccaagctagcctgctgagaatgagagaccacatggagcagagatgagccagcccatctgagaccactctagaccagcagctctatagctgacaagcagctgaccacaaacataagggatccaaggagaaaacagaagaaccacccagttgagcccaaacaaaaattgctaacccacagaattgcaaattaaataagtggttgttggccaggcccagtggctcatgcttataatcccagcactttgggaggctgaggcaggcagatcatttgagttcaggagttctagacaaggctggacaacatggcgaaaccccatctctactgaaaaaaaaatacaaaaattagccaggcatggctgcatgcacctgtagtcccagctactcgggaggctgaagcatgagaattgcttgaatccaggaggcagaggttacagtgagccaagattgcacaactgcagtccagcctgggcaacacagcaagactctgtctctaaataaattaagtaagaaaataaataggtggttgttgttttaagccactaagttttgggtagcttgttacatggcaaaagctaactgataaaacagattatttgagaagcatgacccacattacctttgggaagtcacattttctggatttcaaggtcctcatcccataaagtcaggaggtggttggaggacctgtgcattccctgcagcgctacaatttttaagacaataattataatcacttacacttgtttgtgaccaaacttcacaaggttctttgtgggttggtccccttggaaccaatcacactgtttcctgatatctggggacaagtaaaaagcattttcacctaaagaaaaaaaacaaagaaaacaattgaaccgcatgctaataacatgaaaattaaaattaatctgtcaacaagttaaatgaatcacataacatttatttagcccataattattgttgaattaactatatcagacaaactatgtccagtgattttaaacataaagtatgatggcattggatccataaaacatggtaagccaatatgttctatttggcaatatttgggtgattaagttaaagatatatttatccaacatgagagagaagacagggatagaagaaaaatcaagtggagagttcaacaagttctagactcttggacatcagattataatgcaactgcttttcagattttctcaatgctttgttgaacaaagcttttgtttttaatctttggaagacaggaacagtgacctgtgggtgaacctgggggattacctttgcttcacatttttctttgaatcttttgggggccagaccttcacaaatgtgaatactgttttcatagacctcaacattgccttaaataataaacatttagcatatacatgtttatttatactttataaatccccctcatctgttccaagccttgcctgtactgaccctgggctgcacactgtacacaggctctggaaactataataggctgcacctcctcaaagagcagtctaggggaccacagacccacaaataaatgatcaacaggccaggtaatagatgccctaaatagggtgtccggattaaccatgagcaggccttgggagcagcagcttccacggcgagcagaagccattggaattgaactttgaagatgaatatgggtttgctgctgaagtgcggtggagagcattccagggagggggagccccatgagcaaagacccagtggtatccaagcacggggctggtggctaagccccgatcaaagcaactctttctagaagctttccccggtgcccctaacagaaatcacttctctcgcgacatgccagcctattatgtcatgcgtaataaatgtgcatttgatccatttgcccacccatttgtaaactgttaaggacaccaagagtgccttatgactaggtggcgcttggtcaaatgtggtggaataaaggaatcaatgagaacaaggatactgtctgcatgttccctgcttactctggctcctaaaagcatttgtggcatatggcaggtgtcaatatatgtctgttcaatgaatgaaacagttcctgtcaacacatcggttgtcttttccatgactgttcctacacttctcctggcccgagcataaagccaggccagggcacatgctgtgccacgcaggacttactgctgacgaaggatggcaacagcctcccgaagcgcatcaaaggctcctcgttgagctcggtggacttgtccactaatttgaagaagacgtcgtttggctcactggcgaaggtgtatacctccttgatgttcaccttcctgccaatgcccaggaccacgaagaagtagcccttgcatttggcctgcaggatgactctctgggcctcctccagctgctgctccggcacctcgcccgtcagcatcaggaccacaattttcaggtcccgtgggtttggggcactttcaaagacattctctatggtgtattcaatggcactgcctaaggccctggttccctgcaactgtgtcattcccctgctgaggaagtccaccagcttctccttggagccatagtcagtcagggagaattccaccttcacaggtggcatgctggcattgtccacggactcagagggcgcgtgctgcacaactgccactctggcgaagtgctgggaggccttgggatctgggctcatgtccagttgtctgaccaggtacgctatgtacttcttcatctcattgaactggaacagggtggtggtctcagcgctgtctaagatgaaagccatgtcgatgtccacatcgctccctgccgctctcctgtccctgaaggaaggcctccaactgccaaatccacaggatgggtcgatgttgcagatgtctagaaagaagcatggcagcctatttgttctgtgacacccacagcaggatacacagctcatcaatctgctgggagacttgggcgattaaaatgatcacataagatcaaaagcgggccggaagcggtggctcacgcctgtaatcccagcactttgggaggccgaggcaggtggatcacgaggtcaagagatcgagatcatcctggccaacatggtgaaaccctgtctctactaaaaatacaaaaattagctgggcctgatggcgcatgcctgtaatctaggctactctggaggctgaggcaggagaatcgcttgaacccaggaagcagaggttgcagtgagccaagattgtgccactgcactccagcctgggcaacaagagcaagactctgtctaaaaaaaaaaaaaaaaaaaaaaaaaaaacatcacaaccaaaaccaatttatatcttgccttgatttgattatggccagatttcagtttctatcacctaatacttagtagatgaaacaaatcactaacctaaaatctttgtagcataccatgtgctggcatttttaaaagaaatgaaaaattatattacttctctgccactctttgaagaaatatgttctagaaagtcactagtgccaatgttttcattctagattctaatgtcaaaacttaagcagaaactgcctcctcctttgttacctataaaatgaattatccgccatcaaagagaagctctgttttgggaggtccatttttaatatagaaactgctgcagtagtatttactctggtaaatacgaggctttgtgaatcaattgaactcaagctctttttacagatcatcattattctctcactctcccatggatattatgttttgcaattgcagctgagcagatcttcctgttagagaaacagcttacccaagcaaacatgacacgtgaggacattctccaggaagtctgtgaggtctctccctgcaggcaggacaagcgcatgccccactgctgtgttattgatctggtttaaacaaaagaacaattttggtaggggcgtacatgatcagtaatatctgaaaatatggcagaggagtaaatcaaagctacatcaataaaatagattaacttcccaatagggcagtattgggaatatcttctcatttgggggtggggttaggctctgagtataatagaaagacataggttttattctactagggtgagctggagttcatatcccgttcaaatgggtttcagtttttttcagctgtaaaatggggggtaataccttcctaatggtgtcatttggagggttaaattagataataaatgttagtaactggtgtatcctctggcaaatagtaggaacttaatcttatcgttatttttagcaacaatatgggagctccatcccttccccaccctctcaggtgtggttaaagcaagtaacaaaatcactcccagtgggtgcaaagagtcctgtctatcgccgtacctggcacacgattagtaattattcatttaacaaatagctagtttgaatgaatgaatgagcaaataattaatgaatgaacaattttttgatctcgttgaaaccatgctaagaaactcacgtggttctgggtccctcagcccacacaaggacagacttatgtgaatgaatccccccatcaagagcacatggccggtagcccaacttcaacactgaattcccaagcccagcgctctatgcacaaatcatcctgtgttcggcagaacaagccctgaggaatggcagtgatgacccaatgtctttcgccgacacaggctgtggtaaaagcatagaatatccaatgtggaaggaaagacattagcaatcatcctgccccagtctcaatttacaggtgaaaaatctgagacgcagggacgctaagtggcgtgcacattactttaaatgggtggggggagtgtggaaccaggccaaggcctcctgactcccgggtggactccttcctacccatcacccatctgtcttgaacagtatcgccagaactgcactgaataaatattaattgatgtaagaattaaactagttgtctgggtgcggtggcttacgcctgtaaccccagcactttgggaggccgaggcaggcagatcacgtggtcaggagttcgagaccagtctgaccaatatggtgaaacccccgtctctactaaaaaaaaaaaaaagaaagaaaaatacaaaaattagccaggcatggtggcgagtgcctgtaatcccagctactcaggaggctgaagcaggagaatcacttaaaactggaaggtggaggttgcagtgagccgagatcacgccattgcactccagcctgggtgacagagcaagactctgtctcaaaaaaaaaaaaaaaaaaaaaaaaaaaaaaaaaaaaaaaaaaaaaaaaaaaaaaaaaaaaaacacacaattaaaccagttatttaatagaattacaagcgacacttggcctctccgtgggctgacccttggggcctcactgaagaaagctttgcacagtggtgtggtgtagattgggggtgctgagtcggcatagttttggggacctcactgagagactacaggcctccagggccaccctggatattcaccttcagggccgattgggacagagtggagactggaatgggtatcatcagcacatgggtttcagagtctaatggactagggtcctagcctctcacgagcacctcactaacagcaggatcttcctatccatgaggtgagactgatgatacaaacctcaccagccagttatgggaagcaaatgcccagtacacagtaagacacagctcagagtgtgcacagggggccatcttgggaggagacaggaaggatgcaaacgtccaggtcctcatgaataaagcaaacaagtcacaccaccttgttagtagatagagagtgtcaccaacactagcatcactaaccggcaagagctgtcaacatgtgaggagggacctgggggcagtgctacaagcatgtaggcgtccctgtagtgctggagccacgaggttgtcctggagacctcacaagagaagttctcaggcagatggcctcattggggacgttttaggagctatgggacatgaagccacaaaggagcatggacgtgtctgagaaccttctcagagccccagaagaaagggagatgccaacagcacgcacagagcacagacctgcaaagcgttgatgagctgccggtcttcctgccttgtaaggaacaagggggtgatccccgcatctgagagcttgagcacagcctctctgagctgtggggatgctcttgtgggtgtgttgctgaagaaaacagccactttcctcattaggaatccgttcctcacacgcttaaatgtgttcctggccacaaacgacatggcagtctccagactctgctgtttggatgtcagagccacctgaaggttcttaatcttgtccaggaggaccgacttcctcttggagtcagcaaaccggatctccgtggtcacctcgttgttgtaggtgaccacagccacccgggccccccgtgggcagttgctctcagcaatggtcaggtcattcacaatactcaagaccacatctcgcatccggccgaaagtgtcttggttgactccctcagaggtgtctaaagcaaaggctagttctgttgggaagacggggcactccaggggccctgtggaaagtagagggtggagggttaaagacaaactgtacttactacaaaagggaggcttcctttccttaggagaaagtcaccaaaatcaacttaccgtaacagcaagctagaaaagaagcaaagagaagaaagggtgagagactactctaccatgtgagaatttcgaatgtaaaaatatgcattgtgagacaacagaaaatcatgtacttacggcatttatctttgatgctttggatgagggcacattgctttaaaagaaaataaaagaatatgtaaagagagcaaatcaaaggctcatgaggttaatgagtcattctggacacatgcaacttacatcgatggagtcgcccctgttgcccttgggaccctgtaaaaccaaggaacgaaaggtgagaggcacagcagatggggaattcgaataaacaggctttggcccccagaaatacacagagcaagacaaaggggcccctggataaccttgattgtttacagcctctccctctaaacctgatcttatcccttgcaaagcaaaaaagagaagattctggagcaaatgtgtttccctgggaggtcatttggcctttgaaatagtctcatgttctgaaaccaggaagctcaccaccaatccatgtaaagcccacgagtgaacctgggtctagattctgcttctcttgagaaaagagctccctttcacacgcttgatacgctgtcccctgccgaaggggcagtgagagatcattgagctgccctggctccctccgtgtctaaagcatcccagctgaattccaccccgaggagctctagggactgactcgtggcttccctcagtgtcccatgcctaaacctcaccaccctgacagcccagcaggcatctcatgggccattagttgtctttccaggaggctatttctgcctgcttggtcttctgcaggaactggcttaatgtgctccccccaacacttcacctacttaaagacagcaatcagacccacctgaccagctttcttttccctaattcaaccaaactaagccctgaacctttccttctaggaatgattttccaactcctgaattatcttttccattattttttgaaactcaccaatttcaatattgagggacaatatatggagaaattcaaataagaaaacaaaggtattagcaataaagaggtttggaagggctgtgggaggatgccctcctggctcctggtggcagcatgactagtgggatttaaccacaaatcaggagctcccttggggatttcatagaccacaggaagcattgtcaaaccaaggcctggcataattacactgcttctacaagatgcaagcaaaaggtatttagatttcccctctttggtttctcctctacacaaacctcaaatgcacctatgccaggaaactataaaggcaaattacaatactccctagatgacaggatatcccatgaaacctatttttttaaagtttcttgttactctaaaattcaaaatctctttgctgcatcatgatgtcagagaggcggtttgacaaccaagcaaatacaaagagagcacattttcttgtgagcaaagcagatggtgggaagttttcagggaccacgtgtaaagcacccagccccaggtggccgggtcagaactggataaatacttacagctggtcctgggtagccagggtctcccttctgtccaactatccctggaggtcccgaatttccctagagggagcagaacaaacattgttcaactgtgtcagaaagtggagaatttaaggctcctatagttggaaggtacggtaaaagtgatctaacccaagggactccatcaccacgaaaaatctctcactttaagggagctaaaatgtctcttaaattcaagtttagggacaagcaacctcaacaaagccaatgggagtcccccaccaactatagaggtgttgtatattgtgttctctgccaggctaaggtaagacaggtgctttcccaagaaccactaatatgattactaaggactcccaggagaataggtaacagacagtgaattagctaatgcgttcagtgtagataatcatccaatgttttaaagctctttgggatattaaatgatctagtttgactgtcttcactgatcaaattaataagataattatgtttctttttaaactacatttcaggctgaaaataactgttagcaacctttacacagatctaggccacaatttgctaattgaagactctgccattttaagagggtgagtaaacatccattgaagaataatctggccaggtgtggtgtctcatgcatgtaatcccagcactttgggaggctgaggtgggaggatcgcttgatcccaggagatggaggttgcagtgagccaagatggcaccactgcactccgcccagatgacagactgagaccttggcaacagagtgagaccttgtcacacacacacacacacaaagaataaaaagaaaagagctatcagggctaaaagtagcttaaggaagaggaatctcagcaccagtagtctgaggagcccatggccttggcctggctcgcttgcaagcctagaggcttcagaagcagttgccatgcctcattcactcccattgcctggccgtctgggtgggcatggcccaaagtgactgcacagacttcccagtcacccataatgagattcgagactgcaggtgggtgctgtgcctggagtgagctgggctggcgaccctggaggtgagttggaggaagaggaatacacctacaggaggagagccatggaccacagccatggtggcaccctgaggacattggtctggggctcaggattcccttccttccaccctgtgctatccctggccagggtgcaagtgaaggataattgtcaaagcctcagcagttaatcacattgagacatacgttctcattcctcacctgcagccaaggcccacgcaaacttacccttcggcctctgatgcctttgggtcctgttgttccatttagcccaggttcacctgggttaccctgggaagaaagccgagaagtggcacagtaagctttggaacagaagatctcactgagggtccgtggggtaagacatccaggagacgtgtgggtcacacttttcccgggcagccaagtggttagttttgattcacttttccagtgggttactactatatttgtggtatttgcagatggtcttaatttaattaatcagtaatgatactatcatgtaggttatagcatttcacagcttacagagtactttgattgcagcatattttatttaaatctcataaacaccaggacaagtacgtattatgacctccacttgacagatgagagagtattttagggaaggaagggtctttctcagggtagcccagttaactgagtggctgacccaagactaatgccaagatattctgattctcagtccatggacataccagagccatcccaaaatcatgatgatgcttcaccgaccagggattatttacctttggtcctgggtatccagggaatcctctttctccctataaaggaaaaatagattatttaatacttggttctaatttaaattcatctaaaataaattgaccttgaaagaaagaaatgtctgctgagtcatcaaacgaaaacactcactcaaatacaaagacaatttttaaagaaataattcttttaaaacacaacacatcagaagttgtccttggagcctcctggcagcaaggacgcttggataatcctcagcagatacgtacttttttgcctctgcgtccttcactgccaactccgtctctcccgtcatctccctaagagtgggaaagagatgtgactgtaggtcgccatgcctggcacaccataaccaccgtctctgccctgccgctgcccctgagaagtggatccttgagctcctgaaatgtttgcagactaaggtacaggagtaggcacacttcctgctcctgtcctatcttccaagtgtgaacaagaccatttctgtaggcggtgggctcaaaggactcccgtagcaaaatggcactggcggactaacatagaaagaactgctggttgcttttggtaaagattctgtttggatgtagaatcaaagactcgtcaaccccaagaatcttagaattgacaggaatcttgatggttactttgattctatgcatccgtaagtctttgattctacttcaaaaccaaaacactgaactccatctctcaggcccaggtcatattccccctccccatatcccttcccttccttccaagtcatcacccctagaccccctcctttccaacacctccccccagcatgctcagatctgttcctgttgctctctcatgaggagcattcagaactggacgtcattaattatgaatcagaagaatcagaagaacgtgtgtgaattgtacattactatctctaacatatgtaggaattgccacttagttaatttacagttttcaacagatatcaacaactagagatctgttgacccaaattactagaaacagaatcaggaagagatttccttcaatggtttgaagtctgattttttccctgtgcttctgagattaaaagtaatacaaacagattcgtttttaaacttcagttagttgaaaagacaaaaatgaaagacagaaaaatattttgatgcttggaattaaaacagtcagatcaacctggtccttttatacagtgttaggtgccatgactccttttggaaaaagtcacaatggaccgtagatttctttattcttttgtaacgtagaaatgtacatcacaaaattattgttggtgagtttttggggcatttttaaatagcatttaaaaaacgagttactgaggtaataatttctattcctaagatgtctcattcaaaagaaattgtttccatctggactgagacctaatcaaatccaattccattttaacccaaatgacatttacttctttgcagaaaagcttcatctagttatgcttgcaaagcatttgcgggacctaagatgaaggtagtttaagcttcattagcctctacattctcttgtatcaggaaaaacacaggggaaaaaatgtctctccccacggcccgccccacctctctacccctgccaataaaataaaacttgttaaattaatttgccgcagatgagcaagtttcagtatttccagccgtatccccaataatacaagaagcaaggctcatctttatttggaaccctctcctggcttcctgcaccttccagcaaagagtcagcgacagcctgaccccaagcgcgctgtgaccttaccgtctccccacgagggccccggttcccgattcctccttttggtcctggctctccgggctcaccctagacatgagaaacatggctgagaccctgtggcctggggctggcttacagtgtgatgccaagccatgcttttgctctaggtaagggtgctgcaacatgctgacttcacctttgagatttcggtggaatgattttctaaattgcaacattcatgtgcaaactcctggaaaagaatccaggagggttttgtttgtccttttcaccagcgtggcatgggggacgggctgatgagaagagagagtaacaactgggagaagaaggcacggaaggcggtgggcattgagcccagcataaaaccccaaaacactctccaggcagagaccatcgtggattcacaggaactcatttcttttacagagaacatgcagtcttttcggactggttatgacaaattgtaatttatctcaaagctgatagaaaggaggttctcaggcagccttcatacagcagacttgctgttatccaggacagtcagggtcggggctcttggatgatctaaatgtgattagctgagccactgtgcgtgcactgcccatgtttaaagactgctcgttccatattatactgaaactgtaccaagcactgcccggctgctctgatggctcagagggtgctgcactattggcacaagccaagcaagagaggagcagaaaacctggcagctgatggagggctgtggccaggagaaagccagccctctgagcagagatggttggtggcagggatggtggtgggaattatggtggggattgttgggggacaatgattccactggccaagccgcgatcaacaggggaggctggagtgggaaccagtagtactgaagaggagggacagacagactgaccaaagagggagaggggcatgtgtgcctggctggtccctgtcctcaggaaagctctacctttctaaagacaaacctttcttcccagtggaccggttctgcctcgttctccaggagcaccagcggcacctccgcttccctggagcaggaggggaggaatgtgtcagtgaagtggccaaccgtccaggcaaattggtctctgaaacctgactctcccctgcatggaagtcagagcccgccaggggcatggaacctgtcccacctgcaaatcccaagcactcagctctgagcacggggctacggactcaaatataaacatgcacagaaatggcatgcacaaatttaaaacatgagtattacctctcagtgccagttttcacaaattaatgcatgttgcagttattaatgtacatatcctaggttcctgacaggacggcaagctcccagattttatgtgactttattctgcctcccttttcacaccctcacagtgagcacctggtacatatgggcatgttaaagcctgttaggtgaatgaataaactgatggatgaaattaactcttaaaatgtggtacagtctacgcaacccacaaataacataaaagagatggtgaaaaagtgcaaattaataaatgtttctggagctactggataactatttgaatagctttgcatctataccatcttaaattgttgattaattacaagttaagtaaatgttttttaaaaacgtctaaagatatgtatttatcagctttcaagctagagaaggactttctaagcaagttcttgcctgcttccaccataaaatatttttgtacatttatgtagcaacatattgagctcgttaccagtttattagtcattttttggtaataaatgataggatgcctccctcaatatcatctcagccatgagggaaacccgaatacgtaattccgtgacacctgatcctagcccagcaatgacagtgtgtctctgctcatcattgctgatagctgctttgcaagataacatctgcagtcacagcaagtttaagggccatcttctgtgctgaactcatgggtgaacttgaggcactcactatacaaaatacataagcacaaggggctatctccagggaccaaaggggaaacaccttgcagaatctaagcattttggtagatttagattttccaggattccatcctgaggcatatcccctgatttccacccagggacacttggaaggagcagaattgagacttagaggcccatggagcaccaaaaaaggaaactcttactttcttggggtgaagtagccagtcactgcaaggcctgaggttaaatctggggtttttgttgccaaagaggagagctaaagggaggtctgtctacaatagcatcatccgagaaactctctcagcctgcttggcaatgtgccctctgttcagctagagagggggctggtattaggacaggcttacccgaggtccagaaatgccttgttctcctatcagccctggaggaccagcaggaccagctgggccctgaggaaggaaaagaccatcgtgagtgctaatgaggtgactttccatgagaagcctctgcatggcatctgcccatcccacagggcctggaacctcacttctgctggccaaaaacggccaccaaaacccacaattatcctgtcttagctgcagtagcagctgcctcaatccagatcgtgaataggcaagtgagcttaaaatgtatacaagcaacaagcattcagacaaaaacgtgtaggagaatcttcacagaagcatcattcacaattgccagaagatggcaacaacctaaatctccatcaaccaatgagtggataaacaaagtgtgctgtagccacacaacagagtatccttccatcatgtaaaggaatgaagtgcttctacatgctgcaatgtggatgaagctcaagaacatgatgctccgtcaagccacacacacaaagctgcctagtaaatgattccatttatacaaaatatccatagtgggcaaatccataaagagagagagattagtggtttccagggactcggggtggagggtgatggggagtgactgctaatgggtacaggtctccttcgagactgtgttttgaacctagatagaggtgatgattgcacagcattgtggaagtaccaaatgccactggattgttcactttaaaatggttaactttccggatataaatgccacccaatcattttttaaatgatttgtgaaatatcagagggcacacagtcacacacggaagcactcacctgtgcacctctggtcccctgctctccctcaaagcccggctggccaggaccgcccttgttgccctttgaaataagagaagatgcagggaggagtcaggatggttcctgtcaatgtcagctctttgctctacagtcatttctgggccagggacttggaaagcaaccagggaaaactcagctcttccagaggtaacagatgatcaaagcggtaaccccaggtgagacactgagcacaggagccagctgtctccctgcacttctacaattgttcctcactcttgcctcacctctcctcggacagctttgtgaaacagggatcatttagacctaaagcagaggaccgagacaccgggaagttgcgggttgctgatggccagataggtgagcacgttctggaagaggcgcccgcccgggacactactgcctcagtcatgtttcctgcacttggaccccaagtccccactgggcaccattttctctagactctgcagaagaggctgtttaaggagacggctgacagagcctcgggagccagaacagcccaaggaggatgaaagaaaaataaatctcagaaccccaaaatcgctaagccaaagggaaaagtcaagctgggaactgcatcagacagagctgcctcccattctattcttaaataagatagctacaaagaatttttttttttttttttgagatggagtttcactctagttgcccaggctggagtgcaatggcatgatcttggctcactgcaacctctgcctcccgggttcaagtgattctcttgcctcaggctcctgagtagctggaattacaagcttacaagcatgcaccaccacgcctggctattttgtatttttagtagagacggggtttctccatattggtcaggctagtctcgaactcccaacctcaggtgatccgcctgtctcagcctcccagagtgctgggattacaggcatcagccaccgtcctggccagatttttttttttttaagctgaatacctccctcacattctgcccacagggaaattccttgtggacaaaggacagacagaactgaaagtcatccctctgctcatgggagacaaaggcatatccaattgcttccttcgccctgtttttcactaagcctaactaaggcataggtgactgttctggtaaactgtgtattcagtgaaaggctaatcagagactcaaaagaatgcaaccttttgtctcttatctacctatgacctggaagcctcctcccctgcctcgagttgtcccacctttctggaccgaaccaatgtacatctcacacatattgattgatgtctcatgtctccctaaaatgtgtaaaaccaagctgtgccccgaacaccttgggcaggtgtcatcagggccttctgaggctgtgtcacgggcatgtctttaaccttggcgaaatcaactttctaaattgattggtatctgtctccgaagctttgggttcacaggagagagtgtttttcactcctgggctgggcggcatctgggctgtttgaagagagtctccagggggcactgcatgaggctcaccttagctccggggggtccccttcggccaaagccaccctgtggaagaaaaagtcccacaaactgtgagggggagcatgggacgctgggcatggggcctagagctctttcagacttcaccctcttattctgcggttactcaggggaatcttcccaagcacccacatcgtgccaagaaccagaaaccacacctcatcagccctggggaaactcgcacacacagacacccttcctccaccctcatccgggtgaagttttgcttccttgctgctcctgttaatcacccaatggaagttttgagaattactgcagacctgccaagcaaaataatgactccttttggctgcacgatcccagccagtttcaaatgaggaatgtgaaaagggaatgtcaacctgtctatttttcttccaccttcccaactgtactgagaagtcatgaaatacattaattataatggaagggagtcccaggttctccaagtgatcccggccaaacacaacacacactcggttaagtaaaatatctgaagcacacacatgtgcacctaaacgtctcgtgtacttaggtagggctcacgacttggcaacatcttcctggatgctccagaggtgacctttagttcaaacatgtgggcttacttcacaagtaatccattaatttccacctcaaaattgtttcctcagcagtagaaaggtttggggtgggactttatgaatgtcccaggcggtctttgcaaagttagggttggtgttgcagaggctgtgaccgactagctctgttgtggggctcagtcatctgctacatcaacctaggaacctcactctccacttccaatggaccagcccagtgatctgcggtgaccagtttgccattattcgctgtaatgccacctgcttcagcggaagatcttggccaccttccatggaaaatttgagacaaggggacactgttctcctctacaaaccaacaatctggcctggcccctcccaaaagagacatgctagagttccatgagagtccagcagcactcagtgatacattgctcaggccagaggccgcctgcggagactctagaaaggggatgtaggcatgctgaagcccagtgggagggacacatttcagcttggcctgagcctggcactgtggtcctaagggaagggatagcaggccattagaccacaaaaggaagaactgagtcctcaagagcccgtgactgaaaccgaattcaaatccagtttctaccttgtgtgtagaattgaaattaattgtatgaactactcaattttaagtcatttcatgaaaccaagttttggctctgctcacacgctgagttgtaatagcccattgtaacatttgatgagtatttcttctttttcattatatagcttctttttcattatatagcattattcaaaaataatgctcacttccaagcagttgatccaggtctttacaatttattaaaaataaataaataaatagtgctcaaacattttaaaatgatattttcaaaatttctattttcttctgaattttcaaagcaaaatgatgcccatagtccatcaatttgattttggtgagtcgctccttttgaaagcccctcaccccagcgaactctactggcccaagtgccgggccgaacgagccactgcccctcagggcgtggctgagggcccagttcccagcacccagccccagcttgcagcctttgtgctctgttcatttctgagcagagacctcccctaggcacccaccagcatcctgaatttcctctgagaggttacaaacttctacaccactggtcttctcccagctacaaggcagatgctgtctgtgcccgaggaccttggaagcttttggttggcttcagaaagatcattcacatcactttgactttagcatttattcaacaagactgaggattaggcatacaaggagctattctgctacagacatttctgaaatgtcttgaaattgcaagatgcaatacgccagaaaaagaagaaatctagtttttttatttcacttacagcatccccccaaaaacccacagataattacaaaaacaacaaatccacaactccctcagccctcttgccccttattccctccctcccccagtattaggatttccatttgggtctcttaaatatttagttggatcaaacctggcccgatatttgaaagtagcaaagatattatttttaaaagtatctgttcagtatgtttttggggagagcaagaattggggagagagaagagatgaagcaccagggaaattataagaatgaaaatagattggagtaacaaccgtttcagaaatccttttacattcactcactgcagagctgtggactaaccatgcaccaggtcatgttgggcagatcttatggcactaagaattgtcacagagccccccaaagccctaatggcactcacattcttcccagtttctccaggtcctccaggtactccatctctccctgggacaccctggtgtggggaaaattagcatgagattctcatctgcagagaagaatgtctagctctgaaatgctgcacaagacattgcagggaaaggggtcgattcacagaggaagagcccgtctgcaggacagttgcacactttgcaggatgcaccggacttcagtacactcccacctctacaagcctttggcttaacaagcaccttccgtaaatatctaagaggcacagattctgctgagaagccccacttggcaagggtcactctggttccccacggagacttccttcacggggactctgctgctaatcttaggctacgttgcagtgttaaaggccacgtctttggcctctgtggctgctgatgagccgagaagtgtgtcctttctcttgccctcagtacagggagagtctaggaatgtgcagcaccttaccatggggccgaggtcaccggtttctcctttgggtcctctctcctggctgtcttgtcctgggttaccctgaaagcaacatgggaaagggaaatgagccacatatggaaggaaagcagctgccactggactggatggtcagggaaatattagcaaggacctgcatgcaaggcttcgagggacaagcccttcggccacaacccatccaggtaacatccatgcaggtcttacgaaacccaatcacgggatcagcaaagcactcttagccccaaacaggtgcaatcgttcttccccagggaggaggatgccccaggctcactcctgcttatccttggccacagaggcaggatggactggaagaagaggctagcttgtactgctcatttgcttaaacgttttacagagacacaaaatgagaaaagctgcaaactcttctcttttccaaaagcaaatttgaagtgccctgataccacatttttggaaacttctcagatatttgtataacaggacttgcaaatgattatctggttagcaagagaaccaacacatctccccaaacccccaaactgcaagaaaaagacaaagcacatattttatcaacgtgttttaaagcaatttcaaaagtagaattcttcctttcatccccctttcccaacaaccctcttccccaggctcaggtctgaaatcgtcaataaagaaatctttaccgggtcccctcgaatcccaacatctcctctttctcctttctctcctcgaggtcctttatcaccctaaagaaaaagcacaagtggatgctaaaaactagatgtttccatttttatctcaccctaaaaatcacattcttcaactcataaatcttaactagaacaatgtttacaatttactcattcaccatgaaggcaaattcacttccacatatttttcattcgtttagtaaatccatgaatatttattggggacccactttgtgccaggcactggagatttatttataacaaaacaaactcagtccctgccctatgggatgtgatctcgaaacaagaaaatgtactgtaatgtgtcagagctgagaggggatgtaatgggtgcactcacaggggaggtcagggaaggctgcctggaggaagcgggcttgatgtatatgaggaaagaaaataactattccctaaatgaaatgttgatattctttccataatagcaccaccgtggaaatacacctacccttcttccaggattccctttctctccagaagaaccaggcaatcctttgtctccctgccaaagacaaggattaaaggtcacacctgctgcaatttctatcacagactgagttgttagtttctggaatcttcagaaccaaaagcagtttggacttagagtaaaatcacttacatcttcaccatccagaccatccagtccaatttctcctacttcgccctaagagggaataaggcggacaggtaagtatagaaagctattctggcaaaggaagaaatgagaaatactgggagagttttccatttgtaaaacaaaaccaagcttgcataccttctctcctgggaatccccgagagccctagaaggcaaggcgataggggaagcattagcttttcctgcagggctggtccctcgggcagaagaggccaagggctgttcccccactccaccccatttgaatgttgcagtgtctgaaaatgtaatattagagtcctacccctttggattcctctctcaccaccacgtgcgatgttttaaaactaaaactagaactgaatgcttgggtggtcttggctccctgggccggcgggggtggaccccaaaacccagggcaaggagctgactttgtaactttgcagcccttcccttcagcacctgccttcaaacttcagcaaacagagaagcaagttcaccagccttcaacccacctgctgtcctctcactccactcccttccctgactgctcccacggtccagggccggggccgtgggcaccagcctaccctccgccctggcccatgttctctccttgtgagggtttcctggcttcttcatgtttccacaggaaactatttctccattctcaggctccccaccagctgcagcccctgctcctgaacccaccctgctcagaactgccttccaatgagaggtcacgggctgctgaatgctgaggtcaagaagcctggaccagcgcctccctccctggcagcatctggagaaactgcgagtcacctgacccctccccacgctagcaaccccatcacccacgcctcacctttactcctctctggcccgggcagccctggaaaccttgagtgccgttcacaccaggcggaccacgctcaccctgttgtgagagacaaaggcattttgcaagctggagcccttcatcaccctttctctgccgggcttgcagcagcgtaaagggtactgtgaacagcatgcagcagaaagcagatttcaccatggggaacgccgatcgaggctacgtgagccagggagcctcttgggcccctgcatgaggcctggcctggaacctgcagtttccctgaagggaatgagatctgggagggtagcagcgcagacagcactgccctgtggggcaagggtgggtggcccccagcactgtgtctctgtgggtgctgaatcccgggaagacccaccgggctgacagctcctccaagtgatgcttgattcccagttctctagccgagccctgccggctgggccctggtgaccacactgttcctcgtgagcccctctgtcccctatcccagggctggaccttgatctagggtcccaaagctccccagacaggtgtctgtcttgggcattgctcccatggaccctgctactggggtctgtccatccccaagaccctcggatactgatgatctgatccagcaacatcccctccagggactacccttaacggggtaacccctaaagccctggtgaggtctcctgctgtgtccctgcccctcagctcactcccatctctacttgcatgtcttaatctagtagatactgggtgtgcaaattcggtgtccctctggctcagaaaccaattaatccctccttctgaaacagagtaagaacaaatcccacccttcatgcccacatttgtcatacttcaattatcgtacttagacatccaggcaaagttgttaagaaaagtataaattaatttttctcccaaagggaaagccatcagcaactgaacaaatgatgaaatccacaatgcaatcccaatgggtaaggatcaaggagggggtgaaattttagggactaaaacaatttttacttacgggtccaccctcatcaccaggatagcctcggtagccgtcttctccaggaataccctgaaacaaagtaatcgggtcctctgtttaatcccgtggtcttctttgctctacagtaagaatccctgtggtcccccttcatttggcagagcagcactaaaactcagcatggctttccctgttactgcttttcccctcagtacaccatgtcacgattctctctatcaggatctctaaggctcctgctctgccaagaaagcctgttagttcctactgactcagagcaaatgctatgagttccagctgccattcgcagccaggctgctgtcagggacgccagctgcctttaacattattttatgaaatgaaggaccaagctgttaaagcacagatccccttatcctgtgcaaaaggagggtcccgcctgaaccatcttcactggaacaggccccagcagaacagcacgcaggtctgcccctcagagctcctccttctaacataagaaatggtctctcgtctcctccttcatctccacactcttctgttagagaaattaccccaccaaagtaatgtcgggcttctgacacctcatctcaggcgtgggcaagggtaaagccaccgtacctttggcccgatgctgccgatgggcccgcggtctcccctctgcccagagcacttgcagggaaccccacagcaagctttctcggcaatgttgtcctaccgaaaggaagagaaaccaaatgttcagatctcaagaaatgcccagcagaaaatcataaatgcgctttaagggtcaaaatcggatgtgtgggggtttcacggtgtgagatgaagtccctccaggtgacatttgctggacgactgacgatatgatagaaattgccagcgaagtcaggagggcccagctcctggcggtcggggtgcagatgggaggtcaccaataggaaagtaaagaacaaccaaagtaaaatagatcttatccacaatatcactgcaggctggaccttatttctagaagtttccatcatcagatcttaactataacttacatatgttccagttccaaagtgcaaagccaagcaaatggcagatggccaagactgaaggtggttccagaacagatatccatgaccacccttccttggaaccagggtgagagtcatgggatatggtaccagcccagaaagaggcttccagagcagccatggtgggagcaggcacaagtggtcctggcctcggagccaaaagcttctcaactccaggtcacacagacaccctctacattctcatcccatctggcccctgaccttatgtgggaaagggcatgcccaaatacatttccatctgctaaactaatggtgggcacatgcactttcttccaacgagcttccaagagctttccctttctcccatatcccagatttgtgagctaactcaacctacttccactaggaaaaaaatcctgattctaaccctgcaaagaagtatggaagaaaggaaggtccattcctcccattctcatagccacagtccactgttgctaccatcaaagaatctctgagttcgcagctcagccccacatcttccaaaagctccatccccagtctaaacccaggaggtcacacctccagctgagagaggctggccctggggagaatgaggaagcctcagagggagcttcattgacacagagggaaactagggagggcaattaaagcacttctccacccagaaacagcctttcttttcctgcatgttgtttttatcatgcaagatttcagatgctcttgacacagtttccaattggaggatggacaatctcgatggtttgcatccctgcaatggtgttaaaagaggccgttgctaagggagcagagaaaatgctaaggccacaacctcagcgcgcccaggatccccttccagctcgctggatttccagcgatttgctatctccatttccagattcacatgtgttatggcaacaaggcagttcccaagtgaattaaataaatttaactatctaccaaggccccccccccacctccattcacctgctgataattaacttcattctcttgaaatgccaaaaggtgtggtatctacactggtctgtgtataaagacataaaaaaaactcacaagctgctccgctagttcataatccaagtccagcaagttaagcctcaggggcctgtcatacataaaccctcgcccaaactccagatgcattagccgctccaagttgaccactcgttcaaggcccaccaggatcaaggcacggactcctgcaaagaaagacacatttaatacagctcacctaggcatgtggaaaatgcaatgtccttttttcctgactacatttttaaagaaaacttcagtgtaaaatttagcttttaacttaaatatatttaatcaagtttactggctactctgaattgttgaaatactcaaactttggactctgctgaataattgtttccggtatgtcaataactaaacctattactaaaaatataggaagtggcatccatgaagtgtattcatgcatgagttctcaaactcaggccctctgtaacacgagtatgctgtgggaagtattgaaatactaacacctccaaaatcagataatagcagcctcatctccattgcttgggaaaagtaagctaataaatagaaagttcttaggataaattacacttctgtaatggcatccactttctgatagtcagtgctaccaaacgccaaagcaagtgaatagtcaaagatcacatctgataataggcatggctgtcaccttatgtttggtacgtcattgcttacattattttctttgtattatttgggtgtagtgttattaaatgttgaactgtgataactgcaaaccaaaaatagagcaatgtatttttattagtaactaattcctagtttatgtgatgaagttaaatgaatcaatacgtcatgatcttttgcaaaagcatcatgctttctgaacattctaccacctgaacagccacaacacaacagtaaagctgtctaagtacagaaggaatttttgttagctccatcccacagctccaagcaggtgatgaagggccacaacgctgggaggaagagtctcccaagacaacgctgctcccttggggcgctgcattagcagagaggtttctctccagcagagcagtacaccccgcctcaccagggtttacttctcatatttagaaagccttggcacctaccttcttggcggaggttctcagatgctctgtgtaaatcagccagatctccgtctgctccatcagtaaaatgaatgaccacctgcagataagagagctgtcaaatcccaggaaaactaaaaaggagtgttgcagactgctgatagaaaactgagagactcgctgtctcaagcccttcattttacacttaaggaaactgagggcccaagttgaggaatgattacccatgttcacaagactttgatattgcacttaaaatggaggagtatatttgagtgcttaatttattttaaaaaagacaagcagcaatgacaataaaaacaatttttatctcattctcatatttctaagatgtagtttctgcgaatcatatgcatatgtgtgcatgcatgtgtgcgtgcatgtgtgtgcatgtgtgtgggtacatatgtgtgtgtatgggtgcattgtgtgtgcatgtgtgtgcacgtgtgtgtgcatgtgtgggtgtgtgggtgtacatgtgtgtgggtgcgtatgtgtgtgcatgtgtatgggtgcatgtgcgtgcatgtgtgtgggtgcatgtctgtgggtgtgtgtgcgtgtgtgcatgtgtgcatgtgttatgggctaaattgtgtcccctcaaaatttgtatgttaagtcctaaaccccagtaccgtaagaatgggactgtatttggagatagggtctttaaagaggtaattaaggttaatgagatctttagagtgaaccttaatctagtatgactgatgtccttttagaagaggagatttggacacagacatgcacagagagaaagccatgtggagacacagggagaagacccctgcctacaagccaagcagagaagactcaggagaaacagccctgccgacacctcgaggatgtcaagcctccaagactgtgagaaaataaatgtctgttccaaaagcccgccaggctgtagtacttcatgatgatccctagcaaactcacatggtgtgtgtgtctacacaatatatatgcatgtatatacacacatgcatgcatgcacacatacacacagagaaatgaaagtggagaacgtacctgactggactataattaaacataaatcaatcacaaattcaactcattcaagttaaactactgatttccaggattcttttagagcttacgtaagactaccaaaatgaggaagacagtacatgacattagatcagttaataactaagggattttccatatagacactaacaatccagtgaaacatgaagaggatttaacttgggggaagggcttcctcctttccagtaaaaatttggaaatttcccagggagcacctgaaccaactggccccacagaccttcacgctgtccggcgaggactgtctgaacttgttcaggtagaccttcagggtgtcctccgtgaggacgtaggggtgctggctgcgcatgttccggaacttctcgagcatctctggctggtactcgtcaaagtcaaaggcctccaccgggcccgagggcgtgttggccaccactgacacacgcacggtgggcgagcggccaccgctgcagctgaccctgtgcatctggctgattctgttcaagatggcgtccaccttggactcgaagcccttctgggccacaaaaacattctggtctctagaaccatcaaaccccagaatcacatccagattacaagctggaaaggagaaatgcaggtgatgagttctcagctggggctgaggagacgaactctacttataccagcagtagggacaacccaggcagaggaccagggcatcgcactcaagtgcaaaatgagatcctgtgtgtgtgagctttgagaagcaattctatccacccctctcacagagagaaatgagggtagctgttaggtgccaaatagtaagctattttaaaaagtcagctttgttggtggtgttaattaactttggtgtgatgatacaccactggtgtttagatgcaccccaagtttgtgctttaaattaaaagcacttgaaaatcaaatattctgatctcaaatacttgatctaataaatctataattagacacaggaatcaataaatctgaattgtttgagggattaaggaataggggagaaaagtaaatcttataaaagcaaaatatgatagacttctactcttgtcttggaagaacgccctaggtagtggtgaggtgggtgtcaggaccagtcccagtgggtataagtaaatgtatgaagcaaccaaatgcctaaggactccagaggtcagcaccagggaccagacagctaaagaggcacaaatgtcaacaggaaaggatggaaaatatgcacataatgggagttacctttggcagcatcagttacaccagggcaaagggtttcatgcatcgcatcatgcaaagtttccaaaacttgctcgctcagttcggacagctcctggacgttgcccacgcggaacgctgtggcgctgttggacgctatctttccaacctcctccgagtcgatattcctcactccaacagcaaacactttgacccccctctgggtgagggccaggctcacatcctgtgcatcttccaccgactttcctcccgtgatcacaaaggcaatctgagggacccgctggtccaggcggctgcctgcctcaggcacaaagtggtttacccgcaggtgctcaaggcccaccttagtgttggcgtgtcttccccctttgtagaccactttgttgatggcgtcaataatctgcctcttggtagagaagtccttcaggaagaattcgtcagtggggtcagagttgtactggacaagccccacttggatggagtcgccatcttcataaactgtgtccactatttcagacacaaaacgaagcacttcctggaaactgtccctcctgaagttgatggaaccatccaacaggaacacaatgtctgctttcttcttctctagaagtgattaaagtgaaaataaggagagattaggtttccagacccagaacataaatacacaaaaggtaaaattaaataactgaaataagacattcctaataatttattcacagtgaaaccttcactcaaatccatgcctctttagcctgtagttcctgaatttgcagctcccaaacatgctaaatacaagaagatgaatgataaatcctctaaacaaaaaggaaaggagaaaaattatttgatgtcacactctgtgaaaactcagtgacagagaacttcagttatcccgtgcaaaatggcattgtgacaagaattcaatagggacctggctttgacatttgtgatctcaagtgttttaggaaatgccactagaagtttcctttgtggtcaagaattttaaatagttcctggaagtgaagagatgtgtgtgaggtgcaaagcaaggaaggactaggagaaacagattggaaaataggaagaggccccttaacctttggatgatggtctgagagctttgtaggagctggctgaatatcagtggtgtggagggtaatttcttgattataattaagcaactgagactggaatagagaggagaaaggatgagagacagtgtgagggatgtgagatgtgccacaggcagcctggtagggagcagtgagctagggaaacaggcatactgctcccctttgaagaaccaaccctaatggtttgcttcagatgtctacatggcgattacttggaggagggacaaagaaaaatatgggctggtggagagatccactttgcttttgcagccccaaagacgagaaccaggagcacggggtagaagctgaggtggacgactgcaagtcttccaggaaggtgctccctgatggtcccaccaggccaaggaatgaggggacctggactatattgggcatctggccagtaggcatgggccaacttcaaagtcacattcagtggggcatggactggctgatttcaaagatgccatcctattctgagagccaatgagtttgtaattatctcagtgcaacactgcagaacctttcaatggggctatgattagtctcaggagtgatggaagatcaataatatgcttccttctgcaatttcaatggaactacttttccagtatttaatttctaatattatctgaagaaacaacccagagagaagaaaattattaaaaatgactactgattacttttttaactaaaaaaaaaatgttgatgtcacactctgtagtcatgggtcacacggtgcatacctggccgtgaaggaggaggggtgtccacccctggaggtgcaggagtggctgcggagggtccaaacgagttcatgattctttcttctatgttgggaagctctctgaactctcgcactgtgaagaccagtctggggtcattggtgatggtctgcagctctgttctgtcgatgttccggtctcctacccctaaactcacaatgcccgaggaacggatcacctgggcgaacctggacacatcgtcctgggattttccacccaggaccaggaccaggtgttggggcaccccgtcttctatgcgactccccgcagacttaacaaagaggtttcttgccacaaattcgagagccttgccagtgttcagtggggacccccctctgagcctcaggcgccgtatggcgtccagcaccggggcctgggatctgtaggttttcagatagaattctgggaagacatcattgctgaactgcacgaccccaactctcactttactggggccgatgttgagtcttcgaacaatcctgctaacaaaatctcgaatatgtgcaaagccatctggcctaactccctcagagctgtcgatcagaaagacaatgtctgcagcatcactctcaactgctgcagatcaaagaagaaaaagggaaacattcagtgtgtaagtagccctcacccaggtttggtgtgcaccttgcaccataatcctaatcaaccttaagattatatcccaagatgcctgtgttgtttgtatctcgggctttttgaaattagccgttaaaaattggaccttttacaccaaaacaatttctgctccttgaaatatttgaagttatccaaaacgtgtctttctgaatttactctatttaaattttggcattgtggtctgggttactactgatttctaaaatgtaaggagcatttagaaatcaatcttgggctaccgtaatctacagaatcatgaactgttgctaccagaagagaccaaggccactgggatctatatctttgttgtacaagaagagaaacagctgaggccaaaggttctcgccttgtccaaggccatcacttagcaagtgagacccctgaggagcccaacaccatcccagcatgctgcgcaatctcagcccatgggggcagggtacgtataacacagtgccatatccaaggggtcacattaatgctccccaggcatttgtgccctcgtatttcctttttgctcacacatctctagcatttatatgaagtttttatttttcactattattcctctatttccttttctttcttttttttttttctgagacatggtctctttctatctcccaggctggagtgcagttgcacagtcacagctcactgcagccttgacctcccaggctcaagcaatcctccctccttatcctccaagtagctggaactacagacatgaaccaccatgcctgtgcctttattttttaaatttcattaaaatttttttttttaattttttggatgagggtctcactgtgttgcccaggctggtcttgaactcctgggcccaagtgatcctcctgcctcagcctcccaaagtgctagaattataggcatgagccgccatgcccagcttcccccacccaccctgactcattttctttacattagcgcatttttaaaaatatttaattctattaaataactggtttaatttttttttttttttttagatggagtcttgctctgtcgcccaggctggagtgcagtggcgcaatctcggctcactgcaacctctgcctcccaggttcaagtgattcatctgcctcagcctcccgagtagctgggactacaggtgtgtgccaccacacccagctaatttttgtattttgagtagagatggggtttcaccatattgaccaggctggtctcgaactcctggcctcatgatcagcccacctcggcctcccaaagtgctgggattacaggcgtgagccaccacgcccagcctagtgcatttttaacaataaaattaatcaaaagatcctgagaaagatgagccacattttcctattagttagaattttaggtactcctcagatgctattttattaaacttgtatgttgctactccacacatttcaacctgccctttgcctcatacacaattgggcaatttacggtgtaaatgcagcatagtggaagctgagcagctcttgtgatggagctgtttaagaaagagagaatcagcccccgcattggggagctggtccagcacacatggccttggggttctcctgttgagcacacatgatctcacaggacccccacaacagacaaggctactctgtgatcacaatggggcaagatgaaaatgagaccacattgtaaccctatctgaacacagacaaaaagaaaaacatggtgcaaaccacaaaaaggacaaaaacactccctgtcctggttaataagagtgactgctcttctctaccaatctataccaaggccatcctgcttctaggtaagacttaagatacagctacagaatcacctccacgtcttgacaacatccaatccaggccacagttccatttctttaagccttccacaaaatgacctgccactagctcaagtccccccagtccttccggccaccctcctatggagatgccctcatgctttgccacggtatgcattctccctggatgccatgagcaatagacccaacttgttcagtcgcaggtgtgtcctggtggggtctggctggtgggcatgaagaacataaaggtgctgggcgcggtgtctcaggcctgtaatcccagcactttgggaggccgcagcaggtggatcacttgagctcaggggcttgagaccagcctggccaacatggtgaaaccccgtctccacaaaaaatacaaaaaattagccgggcgtggtggtatgaacctgtagtcctagctactgaggaggctgaagtgggaggttggctggatcccagaaggcagaggttaaaatgagttatgatcatgccactgcactccagcctggacgacagagccagaccctgtctcaaaataaaaaccataaaggtaagggcatacaacctttattttaatttaatttattatgagtaccatggcctttgagcctgttatttttcatatggaaaatgctccaaggagaacctccgacgcccccatctcacctggaggtggatagcgagtgctggctaagagcttctggatctgctctgaggtcagggtcgtgatgggcgtcagcagtttctgctccaggctgggcagctcccggaaggtgctcaccgagaacacatattcggggctcagcgagatcttcaccagctcctcctggtctgcgttcctggcgatcgtgaaaggggccacgccaaactgcttgagctccaccgccgggtcgtccacctcatcgtcagactttccagacgagatgaggaccaggaactgcgggacgccctcttcaatgcggctccccaggggcctcttgaagatgttcctggacacgtactccagggcattgcccacgttgatctgccgccctcccttgggcctcagccgctgcaccgcgttctgcacttcatccttgctggaatgggcgttcagcaggaactccaccttggggtcatcgctgaactggatgacagccacccgggtggtgtcaaagcccacgtccaggtagtcaaccagcctctctatgagggtgcgaacgtactggaactcaggcccggcactttgggacccatcgatgagaaagaccacgtccctcttgccaccaacacctgcgaaacaaatgtgagcatggcttcaccttcatcgtcaccaaattcttagcgttcatgagccaccgcccagtttgtcatggattcacaggcaggggatcctaacaccaatcaccactgttaaaagtccaagaagtgggagtcctgggcatttcagtgtttacacatcaaagagaaggggagcaaaggatgaaaaacccgacggaggcagaatcagaagagcctcatcagcaccagcgaggatggtacttgggaaggacgtgacctgcactgcatcaggtgctgctcagggacccgagggtcagccactgggcttcgccagagacagggaccttgtcagatggagtgacctcaactggagcacttgggggaggagcaagggtgaatgacaaagtagggtgggctcagagaggatgggaggaaaggaactttagagtatagataagtctttaggagacaggtgctgctggcaggggaagtggcgcatcagagagggtgtttaagagagaagaagcaatgcattttatcatggatggaaccatccagcacagtggagaaagggtgacacaagagcaagaaagggaactgcagatggtgccactgagcaggtgagaggaaagggagctgaggaagcggagacaggccacccaaggaaccacgggatgacgtggccggggacagctctctttgggtttacttgcattttcttggagaaataggactcaagattaccagctgagagtcaggtgggtcaggagaggtgtgagagaagcctccgaatggggagaagggggaaagagggaggctgttctggagcgcaggagagtgagtgggcaaagagccacagcgttgtggaaatgtacgttcctgacaacagaagctgcacccgcactgtgacaatattcccaaagtccatcctcggcaatctggggccaagacacagcatcacagaggcctcctgcaggcagatacattttggaaatgttgcatttcctttcttgtgttggagacacacaaagcgccttagttaggaagaaagaaagcctctttcactttgtttatcccactgttgcccaaatttacctgatcataaatgctcaggaacatcccacagaaacctggtgggccacactgctctcttccccaggcaccagcgaggagaaaccaagcccctctcagttgcacccaaataatcatcctcacctccctcatcacccactgtatcctgcagtgatttcctttcacttgcttttactccttcctccgctcctccccaactttccttcttttctctcctcttggaagagcaggcaagtgagtgcatatgagggagcaaggccgcatctgcctccttcgccactgtgaaccccccccacccgagtgacccgggagagtggcccttggaggacatttattgagaggtagatatatctttcctccttccttctcagcaccagggctcccaccattttttagtttattgtaccaggcctagaaagagggaacaggaaaaagaaaatagaataaactatggtcataagagccaggtggccttcctgccagttaagacacttctcagcaccaagcaaagtcaaaattatcttcacaccttggctctggagataccaatatttcagagtctatgtcccagcttgcagagtgtccctggtcagactccttcctgcctcacagaaggctgctgaccaaacctaccaggggtcgcaggactgatacgcaacaggcgttatcagttagacggcccctccctttggatatctagacagaagctttcatgcaaagttaaggagtcctgaattccaagctgcacatatgtcccttttggagaatttaatttgccccaaaacatgaatcttagcatctccccccttgaacctctgccatttctgcccatcgaggccaaaaagggcatgtgggttcctaaattttcctgtaattttagttttcacttcacatggcaggaaaagcaaaattgagaacaccttgtggcccacagtccagacaagtagccccagacaatgacactgagtgaggatgcaaagagttccctgcgtacctgggctcggtagaggctgcaacaccggctgcagcctgctcagctcctcgcgggtgagctgggtcaccctctcagagatgacctgttggacggtccccagctggcgaaaggtgggaatggccacggcaaagtccgggatgaaggagatggtctgcatctctgtgatgtcagcgttcccgatgccaatgccaatgggcacagccccacccctcttcacgaccacggaggggttccgcacatcatccccagacctgtcggccgtgaggacgatcagcagctggggcacaccttctgttatcctgcttcccgcagagctgaccaggatgttcctcaggacaaactccagggcggccccggtgttgggggtcggccctcccagcagggtcagctggcggacagcgttgacgacgtcctgcttgttcatgtatgaattcaggtagaactcgggcctggtccggtcgctgtactgcaccacggccacgcggacccggtcctggcccacatccaggctttccaccactctctggacaaactctttcaacagagggaagccgctcctgacgccctcagagccatcaagcagaaacaccacgtccttttcacctgaaactgggaggaggacagcctggtaactcacacaggacatcagagcagcaatttcatatcaacgaggtgggctgcataagagcatcacagggatgtccaagtccaaatccccgaacttgagaaaaggactttgcagatgtgattcaggtaaggatttggggatggggggattaccctggaattagccaggtgggcccaatgtaatcaatcacaagtgtccttataagagggggtaagagggtcagagttagagagaagatgtaaggatggaaacagaagtcagagaggagagaaagtgccaagctgctggcaatgaggatggaggatggggccaggaggcaaggaatgcaggcagcccctggaggctggaaaaggtgagcagatgaagaatcccttagaacctgcagaaagaacacagcctgttgacaccttgattttagcttagcaacactggtttccaatttccagccttcaaaactgtcagataataaggatttttgtttttgtttttgtttttgttttgcagtggaggggtcggggggtggacagaatttcgctcttgtcgcccaggctagagtgcagtggcgcaatctcagctcactgcaacctccgcctcccgggttcaagtgattcttctgcctcagcctccagagtagctgggattacaggcacccgccaccacacccagctaatttttgtatttttggtagagacagggtttcaccatgttggtcaggctggtctccaactcctgacctcaggcaatgggcccgccttggcctcccagagtgctgggattacaggtgtgagccaccgcacccggcctgttttgtttttggccactaaatttgtgttactttgttataacagcaatgggaaactaatacaccaatatagggaccccttttattttggaacttttcaatgcttgaagagtattgttagctttcaaagatgtattcaagaaaaaacttgggatgggaggagagacatgagatggcagcacctgcacaaccactagcattttatcgatgggaggtttcaattgagttgctgcaagtcacaagtgggttaatgggaggaaacggaacccagatgtcggagttaccatcccaagccaacggccaatgggcccagtaatcaaaggagaggctctggagtcttcatttttcatcaaaaggcatacaggggaaattactctcttcactgcatttttatcactaaattaaaggggttaaatgaaaagtcatggcagtgtcaattagcagttgggggattttaatgcagagtttatggtggaaagttatctacctcttctactcctttaatttttaatgaatgtaatgaaggaattataacaatataaaggcattgggtgaatatgaagatgaaggctgttttaggtacaatgtaaccatatgatatggcttttattatgcataccataaaaactgtttttaaaaaaggattttaaccactgatatctaaatctttataacatgtcttactatgaaataatctaatgcccttaaaaatactcaccctcattctcctgagagagcagctagagaatcaaagtaaggagggacatctcatattctattgttcctgctgaaaccagcaggtgattaattttccacctttcctgtaaactcaaggagggcttctatctaaggaccagtggccagcagcctaccctcaactcatgcattagagaactgagtggcagagcaactagcatttctctaccatacctggtgctggtgctccgttgtgcactgattttaagagattcactatctgtggatgaagatctccaatcttgggaagcgactctgcagccaggataaacgctggagacagcacgatctgctctaactcagcagggtctgcgttcttggcttggaagatgaaaggcacaaccccactctgcttcaggttacttgctggcccatccacacggtcagatgaccttcctgcgaccagcagcaccaggaactgaagcactccatcctcgatccggctgccagcagacttcacaaaaatgtacctctgtgcatagtccagcgcgtagcccaggttgagggctttgcccgtcttgatcttcattctcttcacaagattcaggatctcaggcttactctggtgctcatcaaaacgggactccaccttgacatcatcgctgtactgagccaccgcaattcgggtcccctctggcttcacattgagctcatcgataatcttgtagagaaagtcacggacaacagggaactggcccacaagattggctgagccgtcaaagaggaacagaatgtctcgcttgctctctgcaatgaaggtagattaggatacaatgagggacgagagcataacaggaaccaaagcgacttcagcccagcaccatttgacaacaggagttggtgaaactcatctgatgaccactgtgccagcaagagaagagaaaacccaaattcataccacttgtcttgaaaatgtcctatttcaaatcagtgcatatttgcaaagctagtaactagaacagcctatcccatctagcatcatgcttcttcaataaagcaagccagggaaaagccccactgggttgtgttcttacatcaggtggcaatcgctccaggaaaacagacagcagtttcaaactgttacaaataaaagtattgaaaacatggcccttaatatacctttgcttaaaaaaattgatctcaatctctagaaaaaaaaagggggggctgatatgggtcaaccactcaaagataactgggttgccatgaatctgctgtaattgaatgatcaaatcattaaatttgaggttacgggccaagacccacaatagtgcccattactgctgtgtgggtcaggctccttgtcaatgcttcccaatctgttgtaatgagacaataggaaacacagatgacaggccctatggcaccgcaatgtgtaatgtaaataacattctcagttaaaacagttcttagaactattttgattaggtttcaattggtttagtcttgccattcatctgtgtgatgttagcagactggtagatctgatacaaccatatcttaccaccataataatttgcaataataataataagttagccttcccctagaaaccattttaccattgcatgaagatgcaccctttgtttgttttataacaaataattttctagatacagcagatgttgaacatttaaaaatcatgtaaaaatacaatttcaacgtttaaataatcccaaggcatattcatgtaagaaaaatctctctctgtctccctccaccccatgatccccaaatctggattcgaactccagaatcctcacagtcattagaggaaaaaaaatccttctgaataaagggtgaggcaaaatggacagaacataagctggatgttctagactttccttcgtgaacaccctttagacagagtccagccttgctggtacagtgtctcaagtccccattcaaactatttcaatggaagggagccaattgtctttgtacagtccacagtgctcttgagttcagactggcaaactaccctccagggtggtgtctgaggaaggagagggagttcccggcaacaggggaggtttacctggctgagcgagtggtacttcctccacacctccactaacatatgtggttaggggctgaatcagctgctgaggcaaagctggcagggagctgaaatcatccatgagatacaccaggcttgggttaaaagcaatctgctcaagctctgccttattcgcctggctagctcccacacaaaaagtcaggatgcccgcgcgtgtcaaggcgttggcagcttgcaaataggagtcctcagactgcccagctgtgagcagaagcaggagctgcggcacgtgttcacggatcctgctgccgccagcttccgtgaagtggttggcatagacatagcttagggctgagcctgtgttcaggcccgaacctccctggagctgcagctgcctcagatgaccaaggatatctgacttggtctggtatgtgtttaaagagaactccgttacaggagtgtcactaaattgcactaaaccaacacgaatattgtcatttccaatatcaaggctgttaactaggttcattacaaagtcgcgcacataagggaaattggtttttccaacgttggctgatccatccaaaagaaagatgatatcccttttgtttgagtgaactgcagtgaagcacagaaaaaaaagtgagacatacacaaccacggagagttttatcatgtgtgcctacaacacgtgcacacatgccaacatttagaacacagagaaagtcagcatggcaaagcatgtccatcttgtaaaatatggcagatggctgcatattttcctctggtggtggctggtgtttgtgagacatattggtagccgagtttacaaaaccaagttggctcaaagagagctacaacatcaaagttagaatgtttacagacaacaaaagtgatcagaatccttgaaaccaaacactccttccctaaaaatgaatactatgaaggtgctgcatcagtccatatcactcatcccagccaggtttaagtttgcctggctggatcctctggggctcacctctacccacaaacagagggtcttccatccatagctcagaagcagttagccctcactaacctgagaaaacgagttccttaaggctaaaaaaaatagcaaaagtaggctggtctcatattgaagtcttcttcagacttccccgtttgtcattctccactgggactcttctcctattaggaagtcacagtcttgctaggcaatcatccaacaggggaattcccccaaagtgagatgatgggaccgtaaatacacagcaaaatagaaggagactagttgctaggcttggccaaacttatacacatcaagaataaaaagtataattctcaaaatagtgtatttgacccaacacatttaccatgtgcctttaaaattttattttttatttcttccctgatgccctactgtaatttagacctcacaactaattgtatcctaagttgaactttggctatgaaagtgtggattaaaagttttaagaaaaattttaaaagagagagaaagagatggatatagaagaccagggagtgtgaagagaaagcatgcatccaggcagcatgggtcatgcctgcatcaggcaatcctctagtgatcgagtctgcaaggtgggaaagcatcattctgtgatgctcatcttctcttcattaagggcagtgaattgtatttcttcaactcattagctcatagatctgtataatgtctttaaaaataactctccactggcaatcatattaaatgagggatttgaagaaccactaggtttgaactccacacttagccattcaatatgctttcccattgagggtaatcccttaacgagagagaagagagggattaaaagctgaggacactgtgccctaaacagctcagactggggctgtttagaagtagatggacaactcaggaaaggaaagctacatcctggtgatgaggaggagactggacagaaatcaccagtagaaacagaagaacacagggatctgacaagcgataagaactgagatgtgacctcctcggccagaagcttcaaagacaggtggtggcccatggtcctgtggtttaaatcatatggttcttatatgaaatttcattgcatgacattgtaaaccatacaatcctgaacccagtgcaaaaggaaacctggaataaatcatgttcgttgctgctgttttcatcatttgttgtctcttagctaaacacaaacacacttcattttgttttgttcttaaaggccctgcctggagaccaccccattgtgtgtctgaagccatcaccaccataccttcaggggttccagagagggtcctgagaggtgccagcaagccaggcagcatgccttgcaatggggcggctcggaactcagctgggatgaacaccagggaggagtcgaaagcgatctcttccagctcagcctgatcggcacccttgttcccaatggcaaaggccattatgctgcttctcttcagctcctgggcaggctggctgatttcatctagggacttaccacctgtgatcagcaccaaaagcttaggaatcccctcggcagcccggtagccggctgaactcgtgaataggttgttacgaacaaagtctagagcagagcccgtgtacagggccgagccgtccaggggcttcattttccgcacagcggttatgacttccctttttgttggatgggtattgaaataaaattcaggcctcacagtgtctgcatactgggccactgccacctggataagatcctgtccgatttccagcctctggatgactttagcaatgaagtctcggatggcattgaagttggccagtcccagtgcagatgagccatccaccaggaagactatgtctctcttgttgacttcaatgactgtaggtggcaacattataaggcaattagaatggccttaccaagcacaatcaacaatgactttcaacaaagctaactccatttaaaggacaccctcatttactgtggccaacgtgaccacagggccaccccaaagggaatttgtcctaatgaacacataagttatggttgcctccccacctgctggaggaaagctggctcaccttccaccctgcccagtcagtactttttacaaaatagttgcacaaaaacaaatttagttttagtagccacctgttttgtatgctgtcactgaaaattcaataagttctcttctgccgtaaatacacaacttggccagagtgaagtcattgcttgaataattaaagaaaccactgatgtctgctcagagaaccctttgcctcacagtcttcatttcaaaatgctcattgtcaagtgcaaaagctgaaagagcctgcacatccctgttctcttcagttctatattccctgtcttcatttgacagacgaaagaattacttaacataaaacgtataaaaaggaaatcagcatcaaagccagcaagtgccgcaaacatttttcacttaagagacctgcgttttggccaggcacagtggctcacgcctgtaatcccagcactttgggaggctgaggcaggtggatcatctgagttcaggagctcaagaccagcctggccaacaaggggaaaccccatcactactaaaaatacaaaaattagccgagcgtgggggcagacacctgtaatcccagctactcaggaggatgaggcatgagaatcacttgaacctggaaggaggaggttccagtaagccgggattgcaccactgcactccagcctgggtgatagagtgagatttcatctccaaaaaaaaaacaaaaaacctgtttttaaagatcctaagtaatatgacagtgataacttaaaggcaaaccataaagcaaaaacatctcaataagataactgtctcacagtgactgtgaactgctgtatccatgtgcaggcaccctgcccatattgcaagaaccatgaactctgttaagaccacaacacctaacccaaaaacctgacagagattccaagaagtagaggaacataaatgattaaacctgagatggactgttttgcaaaagagtcctctgttactgtattccatcagatagattgcatggcaagttgattttgtaaaagcagacaaaggaaacaaagtttgggatgaaggtaaggaagaactttctaagaatcagagctaccttctagaacatatttttatttttatttttattttaggacagaatctcactctatcacccaggctggagtgcagtggcatgatctcagctcactgcaacctccgcttcctgggttcaagcgattctcccacctcagcctcctgagtagttgggattacaggtatgcacgaccacgcccggctaatttttgttttgttttgttttgtttggtagagatggggtttcaccatgctggtcaggctggtctcaaactcctgaccttgagtgatccacctgcctcagcctcccacagtgctgggattacaagggtgagccaccacatccagcctagaacacatttttgaaatgcagttcatttctagttgtttggaccagaagctgggagcgtgatgcctggggtgagaatcgctgatacatgccaaatgaagacagcagtgcctcatctgggtgctcacctgtagcatcaagacaaggtctatgttctaagagaagggtaacatgttatgcaccaacgtccttaatacaataacacagttgcctactggtgtaacaatgtgtgcagaacatcattgaaccttttctcaatatttcatggtcattgttatgaacatccattctgggctttccttccttcatttaatttagaacatgctgtctctctgggctaccccttcattttgatttaaaatatctttgcagataaaactaatgtgtagatctctagaagacttatacctttgtaccattagagagaatatatatgtatatagatacacacatacacgtatatagacacatataaattccatatatgctataccatgaatctaccactcatgtatttactatgtatatcacacatgacagaaaaatagacaaatactcatataacaatgacctgagaagctacttgctcctataccaagtggcccagattgttatattcttctttataagtaccagcaatggcacaactcttggggtgggagaagataaatatcatcccctaccctcccacgttttccctccccctaccactgcatcactaaaagttctcccgatgagccagcgggaaggaataccttctagatctaatgaaacaagtggcctagtctccttgcacccaacaaggattcagctctgggaaccctgaaatgcacctctggttcccagaggctctgtcccagagtcccctttgattaggtaagaggtcatttacgtttgatttttattcaagtcatgggagctcatgacagatgatatgcctagaaccatgcttagccaaatatagtaaacactgaaaaatattgagtaactggaagaataactgaattcctatgtttgcttcatgactctgacgcaattcacctaggctttgcagaatcatttcatttctctgggggctgcaccatgaatctcctctgacccagtgataaaaaccttgggattctcacagctgactcttctgtgagccacgtcagggatgcatacgcatttccttccacttgacataaatatcaacccaaacacagctgtcttatctctttaatgtggctctgcagggcctgacttcactgccttgttgggagatgaacttgaaggtcctgctactcctcaccaacatggcacaaccctcttcagccctcctcccacgcctctctctgttttcctccatgcctcatccctgcacctccatcagactctcctgaaagcctccatcaggcccacagtcttcctcatgcatcacccaagcagtggacattcctggagaagaccacacaacaaggtacctgcatgccacgctcggaactccagacccccatcaggagacctgtgcctgcccaccatcctcccatgcctccttgggaagttggctgtcctgtcctccagaatgactgtctcatggctgtgctctctgctcagccctctgccactgcctccaaggcctcctcatctgtctctgagaaaatagaagccctcagaggagagcccctgcccccaccactaacccacagcctaccttcctctgccattggctcccaacccacaggctccactccctgtggcttctcatccccctacagcagctgcttctccagcttccatgcatccagggagtctgaacctcaggctccctgtccagtgtgctccagctacactgccttctgacagttctgggaagggactaagtgccttcttgttgcagggccacccctcctgctcttccttctgcctggaccactcttccccctgctctccgcatgctcatctgccttcggttccacaccttctcagggccttccatccacctgatctaaaattcccttccccagtcttcctatcacagccctgttgaatgccccaatgcaacttatcatgctcagaatattttgcctggtcactagtttatattattattgtctctttccccattatcctgtaacagacgagcagccacatctgtctcattaaacagcaccatatctctagtgcttggcatagtgtctggcacatgccagatagtcaaggatatttgttgaatatttacaagttaatcattgatattaaacatgatgtttgtaatcaaggggttgaaactctacttggctagggaaaatctgaaacaagggtcatgtgctgcccattttcattaaaaagttgaaacttctcctggtacagacatatcttcatctggtgcaactcctttgtcataaattcaagaaatcgaaacccagagaggttgcatgacctgcccaggatcacatggcaggtccacagaagacccaagaccagagaccagctttcccatctacagccatgttgcatcgtcggtgtctgcaaaacatagggaaatctctgggcttctatactttgggatgcacaccaatagtatgcaagctcagagaaacctcagcaggtcataaattttcacttgattgttttcttaattgccagagtcacaaaacggcaccatgatggaatgagcatgagcagctccaggcaccgggcatgtagtcctgtacactgtttccattgcttctcaatgtccatttgcattcagaacattattttcaaaattctagtctctctattagctcatctggaggatttgggccaattttatggtcccatcaagtgagaggaaaagctggaaaactgtatgcagcaaaagctaagccacacagaattgacctttcaaacttaaataaatgccagacacagccttctccagaaggcaacactcacatatacttttcttgctacatcacctggtcacagttccaatgcacagattaagtagagatgccatagcctgagctttctacctgtaatttttattacaacaaaagctgtggtttaaaatcatttgaggcaagttcaatctaactcagtgtgaattttgtaacccttgtaaggaaatgtggtgtgttgcctttacatgaatgcagcaactagaactaatgattagcaaggcactattaagtagaggtcagctccttaaataaatagatagtgatgtttttaattaagactttaaaatcttctactcttaatttcatacaatggcatattctccaaaatggttatttttaaattattttcactcctttatcaaaggaaaacctcccttgatcaattgtaattgatacaatgggtaaagcagtatcttattacaatatttatcttgtagacccagactttatttataaagttagcaaataagagttgtaacaatgtgttatttcacccaagaaaatttagatgattggttgcagatgataatcagagtcttataggagcctcggtatccattcaccaattttcattgagcccatactctggaaggaaaatgaagaataaggtcttatagtcaaggactaatctcattagagcatcccagtgtgtaagcaacactggaagtgagttgggtgtttctggaaactgttgggggccactgtgtccctgatttaccaaatggcatcctattggcctgacctaggtaatgaaattgataggtctgaaaagtgactgatgtctcagaaaacagttcaaaaggtagaggaggctatgcatcctgatgcccccaccatacctcctatgtttgttaagtgcatatttgttatgtgacttggttggtttttttgttttttaaaccactccaattggctgttttgccaaaggccctccatttgagcttgtatcctaatattgccactcaggagaattactcctacacttcacaagcacaagaaaaaaaaaacttcataaatatttcatcaagtgattacactgttatttcttaccttcagaagtataactctcagcaccctagcacaaaatgactttgaggagacaccctcactccatctttgcttttggaaagatactctgtctatgagcacacttctaacactgacttttagagctcaatgccatagtcctggagtaactttctcagaactgtaatgagcccctcaagcccatttttaggaagactggattataagtagttaatacggtgatgtttaataatctcaaagcaacaggtttgttgaattagccttaaaagcacgctttctcagcaactcatactctcgtaagagctttcactcactcattggtctttagtttttccgcacacatgacatcacaaacatgacatccaggacccagctcatcagggaaggactggactgtgggtacttacagcttctcccgtggcgaatcatgctggtacccaccttacgtctatgtaaaccaacacacacaacaccccactcccacacagatggtgagaagaggatacataccttgtgtgacaatggttggcggtttcaagacaatgtgcctttgggccacgccaacaatgtacggcagtaatttctcctggaggtccccaaagctacggaattccgggacagtaaacaccaagttgtcatcggtagctatgtgctgaagctctgccctggaggcggcctgggctccaaggccgaatgagaacacgctagcctgcttcagtgctaccaccccgtagcgaatctcgtcactagaaggcccggcacttatgaggaccagcacctggggaaccccttcctccacgcggctgccccctgcccgggtgaagtggttctccaccacgaaatcaagggcgaggccgatattggccaactccccaccagcaaacccgagggctttcactgcacccagaacctgggccttggtggagtaggtgtccaaggagaacatggttctgggctcatcgctaaactggaccacccccactcggatctgctgagttccaattgggagtttctcaaggagatttacaaggaagtcgagaatgactgcgaaattgacacttccggtgttgtttgatccatcaataaggaaaataatgtcagcagagtcttgtgctttaaaagaaagaaatgcaaaaaatgtgaaagcattagaacaagtgaccacatgcattattcagtgttctgacatgtttctttggaaaccaataagaaacacgaaatatgggcaaacaaaacacatgttgatgaaggaatgtgaaattctctttcagttctgcattctgaatggataagaggcaacctcttagaaatcatggtgtaaaaaagggacatttatagcaatttttcatttgtgccatcctcatagttaaatttccaaacatcatattcacttttctgaggggacaatcttgggtacatattctagaaatttccactaaatttggagggaaaagtagtagcatgaattgtccactaccaaacctaccagggaaaatcaatgagtaggttaccaaaactttagagatgatttctaatttttggtcatttctcctgcctcctcaaatgattagaataattttttatacaaatccacagctacaaaacagagtcacgatttggtgattcctcaacccagtatgttgctggatgccttcagaaactattgtttcttctcttttctttaaaaaccaaaatgaccttgtacatgcaacttcgtgaatcagaactcaaactacatttaaagttttcatgtaaaaaatactttgatgaaatttttgttgttcttttttctcaaatgatgtttagttgcataaaactcaaatgcaggtctgggattgggcaggatgttttgttcatttattttgtcattgcctctatattcagtcacttaatgcagaacaatgttaagcagagtgatatgaaaccggtcatgacataattatccaaccttgtttttatgacatcctaaactagttacctagaaggaccatgagcatcgaataaaccctgattagaattagcctggggttatacaaagggcagaaaaacagctgaccaagacctcttctctcccccataatggcaaacagagaattcccaacctgatgctgagaacggggttatatagcagccctgagggaggaatagggatcgagaaatctaaaagtcagggccagagatttcacagcatcagttcgaatgtttaaatttggctgatttaaactcaaggaggagcacaattattctagtcgatgtttttgataacttgagtatgtgttagggacaagaagagattatatgtgagcttgagcttatctatttatattctgggattccagaaaactacactcagggtatcatttttaaatgatggtaatattataggtaagaccattcactctgatctctgatcttttcaatgacagtgaacattttatatttaaaattaatgtttccttgtgccaacaaaattgtttttgttctcactgtagaaaaggatccaaagcttgtctcacaaaattgaagagttctgctctagtgaaattacattcttacccaagctcttctcattgtgtgaactgaaacagagattgccaggttcggaactgccctcttcccttcctaatatacaagaaagttcctaacaatatatttgcagattaattctttgcatagggaaatatattaacctggcaacattgctatcacaatccttcttataagatacaatgagtaggataattgttgtgctacagtaattaagatcttgtgtttttagtaattgccacacaaaagttttatataagactaggcccttgattagggcccaaagcatttgccactgttcagccaaaatataagattcctgaaggatcttcaagagagtgtggtgccagggggtgtgaattacacagaaggccatagaaatggcctacatcattgcataatacagaggctccacaaattccacaaaattcctcaacatttcccaggcctaaaccaatgacctcaaaggacacggaaggatttgccacttcctcagcatatcaagacgtttaaaagaaggattaaatatgatcaatacagtcaagcttttaaaaatgatccctaagtcgcaggataacactatttcttctccatttgtaacttacttttgggttgaaatttatagtcatgcaaataagataaatggaccctgagggaaaatccttgaacattctcttgtaaaagactgaacatctacagtggccagtcatagaaacacgttggataatttgtcatcactgaataacaacattatcctcttacacacacaataatgggacatacaagggcatgctttgttattcaagagagctgaagcctcaagggcacacaggggccatgtgtgcttgtgtacagcaaggcggaccaatgaccaatgttaatgttacaaggaatcagatctatgcacaatttaaaagctttaaaattgtctggttttctgcttctatgctttatgtatcacatcctctgtggtgttttctacagaaaagttttacagtgtccaaggaaaattcacagtttcctttgacatccctggaagctcttttcccgagctcactggtgtgggcacaatgcctttcttagctcatgtgatgcctcctttcattaagaaaaacaagttcccattcttgtttcctatgtaaaacacaaaattgtatatatattttacaaattttaaaaatcttcatcctttacagagaaaagaaagctgatgccaaaatcctccctgtcacctttagcttttgttttaaaataaaggttttatatctcaggtatattcatttttttaaagaatgacagagggatttttaaaaacacaaccattagagattgattatttgagtagagttcattgacaacagtggtgatcgttcatattttacacatatgtgtgttttataatcaagaacactctatggggaagttacccagcagacaggtagtaagaagaggcagccctaactaattagcaatctctataatgctcttctaactggctttccaaaaaactataagcagagatgtactgttcttcctaagattattatcctatgtttttgccgtggaacatgcagcgggacgtggtactaggaggaactgcagagtgatgttaattagaaaagacacatgaatggattaattttctgccctggtgctgctagtggcttggacactagaagacagagatgctttcttggcataaaaacaaaggttttatcatctgtgtggaaacacacgatgttggtagtttcatttagcattcactatggtaatctcattgtttgtccattacataatggttaaacataaaggcaaactcagctatttttgtgagtataacaaaacgtcaataaaagatgttccatttctctactggtccctttcactgtttgtttgtttgtttgtttgtttgtttgtttgtttgtttgttttagacagagtttcactcttgtcacccagactggagtgcagtgtcacaaatttggctcactgcaacctccacctcctggattcaagcgattctcctgcctcagcctcccgggattacagacgcccaccaccacacctggctaatttttgtatttttggtagagacggggtttcaccatgttgaccaggctggtctcaaactcctgacctcagatgatcctcccgtctcagcctcccaaagtgctgggattataggcgtgagcccctttcactattttttggtaggtctttgttattatcccgatattccgaaatgtgatggatcagggaattaatgatactgagactatcgtagcgaggagtgcagttcattgtagataccctcttgtcatttcctggtaacctgagtgtttggtttggggtgctcttggagacacccagcttttcctgtcatttggcaggactgatgcctgtgtggtaatgccaggggtgaggcctgtcatttggaagcagggaacactttgcagtgtttgaactgcctctcactctttcctatggagaagcagacccacaggtaagggcatcagcactgccagccccgttaaagctgaaatcaggagtaaccactgggaaaaccattttatgaacaaacttctgaaacaccctggagctggctagttctgaaaccctcttcttcatcaagttctgcctgctcaagacagctagttcctttctgctgatgttgggtcatctctcttcagctcctgctttctgaatccttgttatgaaaaactgacatctggtactgcttctctgcaactgctccagcattctgattgcaatcttgcaattcttctgctgtccctccgatgtggtcctgtagagtgatgtgtgcctccaagcctcaactctctttttcctgccccaccatccatgtgtattcacaagagactgactctccatcagtcacctcacctcctacctcctgtcccagtggccatcttggtggtaaccatttttaaaagtgtaggagaaaaatctgttcataaatcttgcttcctatgatcagttcccctatgccatgtggttgcccactcattcttttttgattcaaagaattatccacttcctcatgcctactaaatacacagaagagagtctccaacattcctacatgatttagttacattatgttcagcctgcgttcacactgcagactctgtggtcatctccagactttaaggtctgtatggacaacctttgtgagcaccaccctctctggtttctgcagtggctggctctctatagttcctacacatctgaggaccacactgagcaccattggaaactcctccagccccgcgattggccctcagaggtctccctgtctacacaccagcagcgtctccaacttgcacactcagctgtctccaggactctccttccgagacctggcctctcatcctctggctcttcagaggtctcctggcccattccagctctcattagctccccatgcagctaggacaccatggcaggctgtttcaggaatttactagctaccactctggatttccttactgagaaaattttcttctgtcctctctattgttccctctttgcaagttccagttctgggaactcctttgatcctgggagtgcctgagatatctgcagaaaggcagggatccacactaatggagacacccactgacttgtaatctctgatagcaactggatgccacttcaaatcagcagttgcttcctgaatgttttgtgacccctcttcacatccctatagcagctgatcaaaaataacttcaatccctccaagcccccaagccccactgcttccctcctttattgagatgatggatgtcaactcaacttgaactctctcaatgtgcctcttatccacctgaatatcttggaaacacagccccttttctcatgccttccctccatctcagagaacatgtgtgtctcctttctggagctcaactctccccctggattcctctctcatttcctgctcattccacccagaattctctgctaccaactatcaaatggctgcatggactcattttctaacaaggggaggtccctctgctctgcccatcgctgatgagtaagctctgggcactcattacagttgctgtggtatggtagagtttgaaattgtacttgtcaaattccttccccattggccatttaggcacttagccctggaaggagagctaacaggcttaactggttaaataacctgtcggccaattagctctgtacatgcaactgcacatgacacatcgatgcaatgtccgtgtgctctcaatacttccagagtggttctcatcaactccattagaattagaagagtctctgtgggcacagccatgattaccgcatggagaagaaataagaagaccagacccacagcccaaatgcacagcctccagctccggctgtcactaaccattcaggactaaattttttccaaaatcaatctagactggatcatagctgaggtttcttgtaattccgattctaccaacactcttaaattaactccgtaaagtagaagagagaagctctctgctagtccactggacacaaaaacagatgccctcgctcccgtctcagttcacgcactctccaacagggagctttccttaaaggaaacagatcccaacaccaaatagaggagtttgatcagatgcacacctcaccactctgaggctttcttttctaaggaaggcagaggtattttgtgggatcataatattagaatgtgggtttttttagactgaaaatattagttgtttaaaaaaagactcttcttgtatgtaggtgaatgccctacttggggagaagactatggaagaatattccaaatcaaacctttgtttttaaacctgtgaacactcatctcttccctggcccacccgccatcctagctgttgctttaaggccagcagttgccaagctcatctcccaagaacagcagggcagggcgtagcttggtggcgttgccattacctgtgatgtctttaagggtttccgtgtccccagccctttctggactcacggatgaatgcacacaggacactaagtttcctactatgtcatgaagtgaggtaaaattctctaggttgaacatatgcatattgagcggttcacttgctatttcttttaacgctccttcatctgcatcctcaactccaattgcaaacacgttaacatcagcagacttaagttccgctgagggcagagcaaggccatccttcgagtgtccatcagttaacactacgataacctgagggactccgtcaccggcccggcttccagcagccttggtgaggtggctttgcattatgtattctaatccttttccagtctgattggttcccccaatataagacatgttggaaatatgagaaaggacttcttgtttagtacgatacgtatttaacaggaactcggtatgtgggtttccgttgaactggaccagagcaaaatggaaatcattttctcccacagctaaggattttacaacatcatatagaaactctcgaacaagttggaaatgttcctctccaatggtccaagaggaatccactagaaatattatatcagcagccgcaccatttttgacatctttaaaaaaagacattggtttagatttttctactatgtaagcaattacttcctatcaatgcaaagccttcctaaacaaatttggtttacactatactgctactaaacacttcacacctcactgataatacaggaaggtagactcacttacctgggaaccagggacctgagcccatgcactcaatagctgctggtgcccagtcactagcccaagttccatactcagagaccatcatgaatgggccagtagcatgctccagattggggaaacaatttcctgggctgtctttaactcaagtatgattccctgtggcagtttgagccccaagacccacctgattaaaccagaaggaagtcttatcacagacaaccaaccatcattttataaattcattctttagtttggaatacaaaaccgggccttgacaaaaaaggaaaagtaaaaattgctattttccattcactaacccccaatgctttgggtaatttgcgtgaaaaataaatataataaatacatgttctttaagcgaggaggacttgtgtaaatgtagagaagggaaaagacttattttttccagattttttgagcatgaacaaactgtactctattagttactgcatatttttcagagccagaaaagtctccatagatgtcaaacattatctatctcatttccagatgaacccagttctccctcaagggtgggagctcagggtatcaggctgtcagtggccccaggaggtgcccttctgcagctgtgagccaggcttgctgctggactctacttacctcaggctgacctgatgccccaacccacgttcttcttccattgaagtgacactagacttccctccatctaagagcaacctggcctggaggaagaatccctcagaggccaagctctctgggtcaaggagagggagacccacctgagtcctttccagcttgcaatgcatgaagcatttcccacttttctaaaactctgaaatcaaattcttaatagagttaattagaacccatgcttttaattcgttttgggaaacagaaatcttaaagattcaaggatcctagatgaaaaatgccttcctgcatctggagttagagagagagggtgatctttgtatttttcagggaaaatagtttttactctcaatcattgacttctccctactttatgtgctcagagaccagccaatgccagaaatgtggaaagtcccttcaggtggtaaaacatttgagatacaaactttccgttcacatccaatgtaaaaacaaatcattttcaagccaattccaagataccaaacccaagttttaataaaaataggtcatctctcactggataaagagtatctgaaaaggcctataaatcctagaactatcctatctgactatcctataataaatggcttagctaccttaagaacatatctaagctctatgtcagtgcctgatgtctaagatctaaaatcaaagaatgatattcctttttacaaaatcaaggacgtttctggctcttacctgcttgctgctgctgggcatgagttgtaggaaagcctgagagaaagaggcaaaagacggccactaagggcaagtgccgatgtttcctcattttgaatttgtctaagcaccaaatatgaacctaaaagagaaaacagggcaaagggaatgatcagtttttgactctcattatgcaaaatctctcaaaatcccatgctttctacgtcctttttagacttccaagaagactttgtatctgattcattctttgaaccagcagcaaaaggatggatgatagacagttagatagatgatagatagatagatagatagatagatagatagatagataaaaatctatacagatacatacatgcgcacatatatgcatatataaaaggaaggaaggagggagggagggaaggaaggaaggagaagggaagggaagagaagggaagggaagggagaagagaaggaaggtaagggaagggaaggaaggaagaagtgaaagaagggaaggaaggaagaagtgaaggaagggaagggaaggaaggaagaagtgaaagaagggaaggaaggaagaagtgaaggaaggaaaggaagggaaagaaaggaaggcgagagggagggaaggagggaaggaaggaaggatggaaggaaggaaggagaagaagagaaagaagcagaagaaaaacaaagaggagagaaggaaagaaagaaagagagaaggaaagaaagaaagagagaaagaaagagagagagggagggagggagggagagagggaaggagggagggaggaagggaggaggcaaggtgggaaggtgggaggaaggtaaagaataggtaagtgagaagtgaataggcagagctctctgtctaaagggacctcagacctcttcttgttagcagaacataggtcacctgtaatggcactgctcactctcctctctggacattcttaaacatagttcaaagaacacaattacatttttagaaaataggcattcatagtagtttctccacaatctgaaaatattctctttctttttcaaattactaatgaatgaaaaatttatccattatgaaagatagttttgattaaacatataaatgagaatttttgaatctagtgactattactttggccacagctaaaaagctatgcaattaaaccttcttttcctccctaagtgatgtacgcagcaatttggaaatagcatattcctaagcaaagagcagaatggaaatgggtcaggagtaaaagcactcataggcacaaggcatcaggttttgacacccagcttaagtttgtaagtcatgtttaaaagaacctcagaggaaagtttcagtttatggagagaacgggctttgcccaaattacaccaaatgcaacccaaccacagcagctgggaccatgtcaagccttgtccatattctctattaatatttagcacttttcctccaaggaaaatctgccatatgccaacctccaatctcacagtggaatgagcctggggtgatttaattagtaagactgtgaagccagacctggaggctaactgccctgatgcagagtctcccatacccacgcgcctctgggggccgcacacatgatgccccaccagccaagttcacattcacttcagctcagtagcgtgcgccatcagacctttcccctgccaacaccttttcttcctaccacaagatcttgtgacagcctcttcactctccaatctccaatctaagagatcagcttgggggctggggtctcccttaagacccctccagagagctagggtctttctgtctaggctgaagtccccttgccaggacagcatcttttttctcctctccttaatgcaggattctggtttcctttaactttttcttagaccacagacggggctgcccacaggaccctgtgctctgaagggccccatgctcagtttgatgctttgatgttgctatcttggaattcttaaaacatttgaacgagaagctcattttcattttgcaatgatgtgcatgtcagtgactcttcttacccagactggccaggggttccccagttaggagctctctggtcaggggttcccttttcagaggtttgggtaacagtactggggaacaaggccattggcgacacaggtaggctaggatgttattaaaccgctgttttgggtgccatgttatcaaaagttattcagcatctactatgtgatcattgcagtttttcataatttttcataatgtgtgttatttatctttacattatccttagaggtagatgctgatcctcatgcttacaggaaaaaatgggggtgcagagaataagtggccaaggtgcacaactattcagacaccttggtgctcaatagcacctgccacactgagggttcataagatgagaggataagaagaacatttttatttctccatgaaaaccccacgattccatagcaacttttcaatcaagttcaccagcctgaatttgggctttttaggaatcagaaaaggagccagagatgttggggaaagacaaggtgcttggaatcagataaatctggatcctggatccaccataccctacctcaggcaggtggtatacttgctcaaagcctccatttcctcctctataacacagaacaatgatagccatgcctctcttccagccctctgtgaggagcatgtggtagcctgtttggtaaatgcctgacgcggaatggatggtaagtgaactctaactaccattctccagcaacgtttcattcatcagcatttcccaaagcacatttcatggaacacccattccattcgatgttctaaggggaaaaacaggcattccatgagcaacgcagtttggaaagtgctgaataccaagcctccttctggaacagttacaatataccttaatatatagcagttctgaaaaataaagtaaagaaacctgctgtacttgatttaacccagaattccccaaacacatttcatgggctattcctctccatgtctaattttgctaagctcttactcctctgaagcagcaaccaaaggcatctccacctgcccaggcctccactgagcccagatcactgggtttgcaaatatctgctctctcggactccattaactgtaagtgggacccatgtcccttgatggtggagctcactgcctccctgtgaccaagtgagagaattagaatgggtagacgactgacatttccccggagaagcccaggggaaggaccagactcaatctcattatcagcatgaactttcatgacactagttaatattgtcattttttcttatattgagtttcaggaagaattatttgatattggaaatgatatagtgtagactacagttaaattagaaattccatttgacttaagaaactgaaatacatataatctagggagattgagttttcatcatcatttcactgttagggtttgaaggttaaaaagaagtctgtttcacagattacagcatgtaaaggcattcagcatcagtgtgaatgaaaatcaaaaacatctttctgggtatcaagtatatgtcagattttgaaatgtgacttttttcatcttataattctaaaactccaaatgcttacagattggttttatatcccctgcatcaggaataatttggcaattccctgaagaaagcaaggggaaatgagagcaaatcaggcacgtgaaattgtttatacaagactttggaaagactgacaagactacatgagatctgtaagaagtgaggaaaatagcacaccaagaaactggataacctagaaaaaaaatagatatttgcttgaaatatacaatccaccaagactgaatcatgaagcaataaaaaaaattctgaacagacttaaaattagtatggggttgaatcggtaatcaaaaaccttccataaaaaaaaaacaaaaaacccaggaccagatgtctctcctggaaaattcttccaaacacttaaggaagaattaacactaatccttctcaaacttttctcaaaaaaattaaagacaaaggaacacccccaaactcatttttataaggccaatattgaaaagaaaaatacagaccaatatccctgatgaacactgatgcaaaaattctcaacacaatactagctgaccaaatcaacagcacattaaaaggattatacactctaaccaagtggaacttatttctagaatgcaaggatgtttcaacgtatgaaaaccaatcaatgtgatacaccacattaacagaatgaaggggtggaaaatagcaaagcttgagacctcacacttataatttcaaaacatattacaaaatggtgtaatgaaatcaatatgatgctgacttaaagacagacatatgaaccaatggaacagaatagagagcccagaaataaaacctcatgtatatgatctttgagcttcaacaaagctacacagtggggaaaggctagcctccatcgtatgaatgttcctcaaaaaactgaaaacagaattatcatataattcatctatcccacttttgggtatatccaaaagaagtgaaaacaggatctcaaagatatatgtgcacacccatgttcatttcagcattatttgtaatatccaaaagatggaaacaacttaaaagtccatcaatagatgagatgaataaagaaattaattcatttcaacagtgttttatagtttttagtgcacaggtttttttcttccttggttaagtatatatatgtatatatacacacacaatggaattttttgcaattatgaaattgattatagatttccaaggctgctttatcataaacaaagagtcttccaggactgtgaagctcagccacactctgagcacagagtatggcaaaatgcctgtctgtatcattgtaggtgtataataaatatttgttaaattcattaactgctattcctacagttctcctaggactttgcactgttattacaccacttatactgtaattttttttttttgagacagggtctccctctgtcacccagactggagtgcagtgtcacgatcacagctcactgcagcctcaacctcccaggcccaagcaatccttccttctcagcctcctgagtaaatgggactgcaggcacacaccaccccacccagctaagctttgtatttttagtagagacagggttttgccatgttgcccaggctggtcttgaactcctgggctcaagagatccttccaccttagccttcctaagtgctgggattacaggcgtgagccactgtgcacggcctactgtattatactaagtcttatacatgccacatacaaggaatattattcagctttataaaagaatgaaatccttttatctactacaacatggatgaatcttgaggatattatgctaagtgaaataagccagtcactaaaagacaaatgcattactttataattccatttatgtgaaggtatttaaagtagtcaaagtcttagaaaaagaacctagaatggtgttggccatgggctgtcaggagggaggcagttgtagttactgtcccataggtatagagcttctgttttgcaagatcaaaaagttatagatatttgttgtagcacaaggtgcgtatagttaacactgctgtactgtacacttaaatatagtcaagatagtatgttttatgttatatggtttttaccacaattaaaatagaaatgaggacaggaaatatcatttgccaggttttaaaagcatgggtaactacccctaaaatgtagccatcaatttaacaggaatgatgtaagtgcagcatctcttttttgaggtgtgatagagtttaagagctactaggaaaaaacagtacaactaaacatcctaaagtgtgtctacatgccgctgtattcaaataacacaatgtttgcccttacttctaaataagatttggaaagaaataagaaaagagtatatgtcatgcaaaatgttagggtttggcaaagaagatcagagtctcatgaaagtgggaaagaatctaatatgaacattcagacctggtgcaaacatggcttctgccttgactagtatcctctgagctttggaatcggctccacccaaggcctgagcttttgtatctctatcttaatcttcctctctccacaggtgcccccatgggctctgcaagtcttcatggttgtctgttgtgtagcacaggaattccattttccccatacagctaatgaaatcagggatgaggatgatctaatgttctcagccttgccacctgaagattgatagcagaggagagtctgtccggctgatgagtgatgtaactttgccatgaatggagcagcagactagtgtccagatggaccacttagcaaaggtacagggagagccacagagagtgattgaggctgccagtcaaggacaggagctaagtgggtgcaaaggaaacctgaagctcagtcccgtggatttgccgtgaaattcctcctgcctgaggtcaggcccagagggagaagctggagtccaaatcttgcggcccagctatgaggaagacggaacacagtgtgggccctaggcctgacccgccaaaaattggtgagatggagacagatgaagccacaaacaagggaatgaacaccaggacccatgtggctttggatttccaaagaaagtcaacaaaaagtaccacctgtgatgaaacaaatgtaccctgtgattcagattctgagaacttgaagccatgatctcagcagctaaaatagaaccacctgtcaatacagcagtctcttggaaatgcatcaacagtgagaaaggaatgctgttctaatgatgctcaggaggccagttatcaacagaacagatatttttctgcaacaaagtgacagcaatgagtggtgatagcggcagtattgcaaaagctcagcccgattttttttcccttgcaatggtcactgccttttggacatggatatatgttaacacaatgtagaagagcagtctccagtgcttgtgctgtggtttgataatgctcccaagctttagcccggtcgcagcacagcagggctcagggacccccgacaggctggactgcctgttctcctccctccacttaggttgaccctacccccaccgtgccacagccccaactttgccccttcactctctaggaatccctcaagcccatgcaaccctgggaaccttccagacttttccaccaagctctacctttcttccctacagtctgttagacccattcctgagtgtttcttcaaataaaaaaaaaaagcaattgcaatatctaattttttgtatgacctcaattaaataatgatatacacttcagaataatataaaagtacattttatatgtgctattcttgattcgttctatcaagcttgagcgtcaatttttttttagcaaaggtaagcttcctgctagattctttctaagaaaatggcctgttctttccaaaacaacctgtattattgtaactggtccagatcaatgttttaatacgggatcaacagattcaaagagtctatgatcctcccacagttgagtgcaaaattgcatctatggatgagggtttttctggagataagggtccatgtttgtatgtgattctaaaaggcagttgtgccactcctcaccccccaaaagtttaagcatcactgcttcaattaaaaattttaatgcaaatcttctggaagatccagttcgattactttaaatgtttaatccatgttcaagaggcatgattttaagtggtatttttgtttgtgaatgagaacacaagagtattatagaggctctttgtaaagcattcggctttgtaatccaggtggaaaaaataggacatgataagatgagagctgtctcctcactgttgagtctgggatgggaagagctgcagacacctgtgcagggagcattgacaaagagcacaagtgaattatgccttgagcaggttttgctaatggttttcttaatcattcccatacctcacacagtgaaagcctttgaatccactgattctgtcacatataaagcattgagtgggctcactctggagcaattccaaaattacatttctcatcttccagagtgctcaatacaatctaaatagttacaaaataaaatccgggaagtctaagacatcactcacttacttcaaccattctgagtaaaatgaacttttagttcattgaaaatcatatgtaaagatttttattttcaagatgtgaatctttggaggagtagccccctcagtggagatacttcccattggaacacaaagtaatgggataaatacactgtgcacaggaattattttatccagaatatatccagatattgagggaagaggaggggagggaagagaaggaaaggagcccttccagctctgaaaaggacgggagataatgcctgtaggacaatgcgttatccaggctccactgatgattcagaacccatatggtttgactgagctgaattcccaggtgggaaaaacgcctttggccccacacactttcctgccatcatgcgggaagcaggtcttgtggctcgtgggctcctagcccagctgttgaatatttgctgatattttcgtttgcaattaactctcttctattgtttgtcatgtcctggagtctccatttataaaaaaacgaaattccctggcagcaaattttggagaactttttcatttagattattaaaagatgtcaaacaccatctcaccagatgaccacccgccctcttcaacaagagggaatgaggcagccatccgcgctcattccccgacaccaccctcccggaggaaggagagaggagagtgctggtaacgtttcctgggcttctgtcttgtgggtgggatttcacgccctcctcccaaccatccgatggctgatttccctccattttatagctgagaaattgaaaccccagcaaggcaaagtgattgttcaaagctacatagataaaaacaacatagaaccagaaccctaacccaagttagcatttccaaagctcatgggaagaaccccgggaaaccctagaggctgtgccagatttggcccagatctcaaggaaactccccatgccttttggggaaaaaatagacttccttggtggtgacacaccacagattctatgtcaatggaagtcggctgtctactatcattctttcaaatatgaaaaaaagactcagaattggctgcttgagatccttgggctggaaggggtctgttccttcatcctagattctgtgtcctaaaggaaacagattcaataagagacattcatcacattttcattctcatctttctgtttaggattattcatctttttgtttactctgcctcattctaaaaaggatttgaggtgcctttttccgtttagtttctatccctttgaaatttaaaaggatacctttcatcagaaagattgccctacatggcccttcaacctgaaatcatattcaatcatattccaatgaatatgatttcccaagctattttgcaattctgtaaattagttttcatttagcctactcaaaacctttttcattttccatgtctggaaatcttttttaagaaagagacacacacgcatgcacacaaggaaatagtttgaaaacaaagactcaaataaatccagagcttccattttgaagtcatttatttggttttctccaagcactgctttttaaaatcagcctgtccctcctatcaagttctgggacttctgttagttcctaattgtcctgtttaaaatgggagcagtggaaatagtcaaagaccacagtgggagagccgtgcacactgactgtgaaatagaaagtcaaatttcagtaaatttgaggcactcatccacccttgcctttgccacgcccattcctagactgcaagaaggagcgccccatttctttctctttttctcactctttctctctctttttgcacgaatcctgggaaaggagtccccgttcttttcctcagggaggaagctaagaaaggatttattaagtcctgcaattagggtaggaggagagtggaatttaatatgctcttggtgtttgaaagacccaaaggagaatcctcaaaagaaaatgttttggaagagctccaagaaacctccaaagaaatatagcaaattttgtttttttactgtttatttaacaacttggatttcacatttctttcttttttcccttttttttttttttttttttgagacagagtatagctctgttgtccaggttggaatgcagtggcatgatcagagcttactgcagcttcaacttcctgagatcaagcaatcctcccacctcagcctcccaagtagctaggactacaggtgtgcgccaccacgcctggctaattttttttgaattttggtagagacaatatctcactatattgcccaggctggtctcaaactcttgggctcaagggatcctcctgccctggcctcccaatgtgctgggattataggcatgagccactacacctggcctttgaatttctattctatgaaaatactctagaacaataatctgtttgactcaaactgaatgtgtatcctgtgatagcaacattttaaaactcttctcatcaggcagggtaactagacctcctttgtcacctactggggtcctttgtcacttacgggggtccttgttagatatggagtagcggattcgagatcttcaactcttcctggtaaaatctaacaaagcaacacctgttctgcaacttgtggattataacaaagcaatgcagaaagagaaggcctggacatcccctaccaatgccctccctctgtgaatgagagcacctgtaagaatatgccgacctgcagccaggcttaggccaagctcctcagaggtgggtctccttcccattacaaaggcaattaagaaactccagattaattacccagatatttgaaaaaattactttaaaacatattcctagcattgcagataataaccatgaggcagaaagttccatatctggtgtgatttgaaaagctagacgccaccatgcaaatgtaaaacacattccacattctgaaatatacggcagccagacaagattttgtctgcacttatactgctaattataaacatcaggcagagactagttccatttcaacattaaagaagaaaggtgcattagaaaatgcttcaagaaatattgcacaaatgcccactccattccaactccttgccacgtgacgctgctggatccaaattggagcttggcacttattcctgtcttttccttcttggcaatgaactaaggtgctactgacctttccaaaactgtggtgttccactgtaaatgattaaagtggctgaaaggtgctctctttgtaaagagaaaagttagatattttgtctgttttctagtctaatttataatcaagtagagaagataaaatcattcttgaaaacagaaaccttttcaaaaatcaagttggaacatctgataaaatatcatccatgctggatttattgcagtaacctgggaaattctacttccttactgcctctgtcagcaatggtcggccaatctctcccagcctcccttttgtgtaaaagaaggctccttgcctgttgctcgaacaggccatagtcctgcgactgctctcttccatctgttgccctgggctctgatgaatgatgggttttctgcagccccagttagaaacagagcaccctggtgcaccgccgggccggctgtgggtttagctgagttggcgctaactctgggtaccggccctgggctgctgaatcaactaatgaagattccagaagtgaaaaaccagtttcctggaatggtttcccttgagatctgagtcaactccagctgctgttcaatttttaattttgaaattaaaccgagccatgagctcttccttccagtgaccaattcctgatgctctgggttcctgaaaacctaatgtatagcacacacagggggttttacagaaacatttcccattgtacttttccctggccacttgcaattctcaaatgtttctctgtaattcatgagtttaaacttcaggagaacagtaggatcatactatgctgaatgcagccagacccctacaagactaacaatttgcctttgggagaaggtttggcagaacttttcgtatttgtttttttcttctctcctttttctttccagatttttttaagcaacagttactcctctgctgaatcaacttaaaagaggctactccaaggaagactgggaatgggaagagtacctttctccacatggcaccctaaaatacactcttaaaggcttgtcccccttgaaatgtccagattccaagatgtctgcatattggaaacatcagacaattctgctactagctctgtggccctgtcactgggcatacctctctgagctctctttcttcatctgaagcataaagggcgtggagaaaccatccaccaaggtagtagtttttttgatatttcaattagccaaacagaaattatatgtttgccaaccagaagagagggggctatgtcttagtcatttttttaatattccccaagaatgtattctctttttttattattttattattattatactttaagttttagggtacatgtgcacaacatgcaggtttgttacatatgtatacatgtgccatgttggtgtgctggacccatcaactcgtcatttagcattagggatatatcccctccctgaacctcagggctcaaggccatgatgcacaataggtcttgttaaacttaagtaaacatgagaacacaaagaccaaccaaagggttaggtttttgttttttttgtttgtttgtttgtttgtttgttttgctctgagctagaattgtctccctcagagtcttaatgctggttatctcaagcgaacagacataaatctgagagtcagtaatatatatttgtattaataaatattcaagacgagacattcataatcatagcttgtgtgaatttttaaaagtatgttaaaacccattgtccattattaggggaaagtatcaaaggacatgtcacgagcacccttacagttctaaaatccggtaattctacagggatacgcaatggcatgaatatgcaaacctactttggttctcaagcacccgactgttcatttaaacctctgtaattagatatgggtaaaatgcttcctataaaatgtcttatttgctgaatacccttgtaatgcaattgtttgggaacaaagatgcctcctttgatggcacaatttcatctcaatacacttacacctgagcagagaagaaaaacaaagctctaacgtatgtacacttccgttattatgaacagccacaataaatataataatgacaatcatgtattgaaatatcagtcctaaaactgcccgcaagctctgctgagatggtcatcactgagttactacaaaccctgaaactccaccctgggagactccaggcaccacttcagagatttttctgaagctcgcagagatacacctccctctagaggaaagaaaaccaaactgccttttcaaaaacagaccaggatgaacgtgctaactcaaaatttcttttctttttttttttttttttttctgaaacagggtctggttctgtcgcccaggcgctgaagtgcagtggcatagtcacggctcactgcagcctcaacctcccaggctcaagtgatcctcccaactcagcctcgtagctgagattacaggcacatgccaccatgcctggttaattttttaaaacgcttttgtagagacaaggtctccctatgttgcccaggcttgtctcaaactcctgggctcaagcgatccgcccacctcagcctcccaaagtgctgggattacagagatgagccacagtgcccagccctcaaaatttcatctctttcccaaaatggactataagaccagaatgtattaaaaattatatttttcaaaattaacaaagtgaattgttgaagggaatatctctgcaaaatcaggacctgtggaatactccctggaaataagacattcatgaccacacattagagggggcaagcaacatgttttatttaaagaataggattgtcctttctttgcactgaatttttacactgaattccactgaagttttacagtggaaacagagaagctgtatctagaaacgggagaatgaagataaccattcttgtctagttcatggctgtctgaattagtaggaaactttaaagctcccccactttaaaatttggagggtttgcggctttcattttcttagctagagctaataggattttctttaaatgtcaggtccctcctcaaatcgtcagctatttatgtagcagtgatgtgttttttactgcctgcttgctgcagccaggacaccatgaaaagtttgctcccgtaagtcagggtggaaaagctgcctggtacacaacatccctgtcagatggaaaccgcctgcaatccttcccccaagagatagcagattttcagcttcttccaaaaagagcagtgacaaaactgaactttcaaataaaaatttttgctaaagctgttactgcgcctgcaaggaagtgtcacgcaatagtattcacgacttgccggtgaattttaagtcctaaacatggaatttcacatataagtgggaggtgatatcaaccgctggtgaagactacgcttgatccagttgtctgaacactctgagcaaggaaacaaatgaaacctcgctggcaaaaagtcactgccagcttccaaagcttccaaagaaggcggtcttgtttcaagctggctttaggcatccaggtctatgggttccgttcctgaaactaaggtcaggatgagcagcctcattggaaccataaatcaacaatcgactgaagagaggagcttcttcctactttctcatcggggacgtattaagttctaggataggaaatcacaaaaggcactgatgataaagtcagtgcaatttgctgagtcctgaatgctttagaaataaaatgaagtgtgaagtaaagacaatttttcagaaaggtgcctacctcgtatcaaaaatatcattcagaccccaggtttggacatttgccacatgtcccctcacctgtgggccacaactatagtggggtggaacacgctccctgccaagcagggaaagagcggggccaagggctaacattctagaggcttccccagccacctcccagaaaggtgctgtagccacaccctccaatgcctggataggaaaagccaggacagcctcacttcaccccaacatggaattccttcccaagccctctgctccactcagtgtctgcttcctggcttctctcgaccatgagtgaggaaaggagagaactaaacctctgggtagcaagaaaccccctaaacaaagaagtccagacaggcagctgttcctacatcctgatctttgtaaaagccacgcctccccacccaggctttcatcctcagctacaagcccacttcagaaagaagagcatacaggtcccctccttcagcgccctccacccccaggaggtggcctgagcagggcggccagccccggtattccggtcacggaaccgatgcccccgccccacggtccacctcccttctttctcggttcattggtagagtcttagtgagcccaaagcagttttcccaacgagatgtgagttatttgggatcctccgtcactggcttgtctgctctccttcaatggggaaggatttcactgccatctcaggcactcgctccctggcctgggcaaggaattccgcatctcagagcccctggttgctcattttgaaaaccaggaaactactgcatcagtggcttctgaccaaaaatctcttccattatctttagcccaacaaaaacctcagaagtcccagtaatgtcatcaacggccacccactcagttttcaatatagttttgcttaggagcaatgtaactttgattttaaagccatttcggttgttttttacagcattaagaatgggaccctggggagctgggggatcccaggttgagcatccaccatccccgtgagctctgagcaccctgcagctctagcaccctgtggtcctcgccggggtgagctgtatgtggggagagaagccagtcagccggggccacagccctgcctccccatccagcacagcagactcccctgtgctcagaggggtttgctcctggggtctgcaccggcctcgaaactggctcctggggcttcctgtggaagcagatttttctttaaccactccctagtccctcccagtgaccccacccatacttcaatacccgttcattatccaacatagtaggccccttgaaacaggttccccaaacaggctggccactgtcagcgaacgtgtccatcctcagcaagagagggcccgagccccaccctgcatcctccgggccagagaacagccctcggggcctcccagctcggcactggcctcacctctgtgcagcatgggctggccctgcagccccaggggccctgccttagacactcagcatgctgcccaaatgcccaattccttcttctcctctgacccctgcaactcctttaagcaaccccaagggacaaagtctccaatagagacttcaggttcctggaaagacgaaagcttgacggcaatgactgagcgaccctttacttggccctgatcctgagcaccagagttactccaatcttgtgaaagcagcaaatgtgctccaccaggaccttcccatgggcggccctgggcagaaaacccatgcaggttgttgcaccctgacctagtgtcaccacccagagagctcagagaacatctcccagcggagccgcccggcagggagctatgctagtcctcagcaaagacgcttctgcaaacaaagcggatcccgaatgggttttagaaggcggcagtaacttaaataaatcatgggccgaaacacactgccgcccggaatgcacagggcgcgtgtagcagccacagacacgcggtggaaaagtgctcacactcttaggcaatcatgaccttaaccaatttaaggaaatcccattgccataaagtgagaaagaaaaatcagcggaatcttccagagacctaaaacatgtacagaaaactggcgatcagcatgaacgtaagagccactaacgctacctagaaaggatcacttcaggttaagagcatttccttctagccccaaacctggaaaaacagaagagaaatcacacttacccctgagcaaacctgaaggcgtgtgtccctgggctcctcgattcaattaggtttgaataggatgcatacttttcccactcactgcgtctctttttctttttgcagcctttctccaccaaaaaagtggagactcagagctgcggaggaaaactcttgcagtccttgcaggaggctggagcccaggagaactgaacggcctttggtggaagactgagctccaaactggactggggccagggataccagtcagggcttcctccagctcctcctcctcctcctcctccctcccggacccctcctctccccctcctcactgcagaactgacccaaaactgtaaatgaaaccagactcctccactctgtttcttctggcccccgctcaggctgatgtcaccctctgaattctgtcttcaccctacaagc

SEQ ID NO: 10 - protein, 3177 aa, Homo sapiens
MRKHRHLPLVAVFCLFLSGFPTTHAQQQQADVKNGAAADIIFLVDSSWTIGEEHFQLVREFLYDVVKSLAVGENDFHFALVQFNGNPHTEFLLNTYRTKQEVLSHISNMSYIGGTNQTGKGLEYIMQSHLTKAAGSRAGDGVPQVIVVLTDGHSKDGLALPSAELKSADVNVFAIGVEDADEGALKEIASEPLNMHMFNLENFTSLHDIVGNLVSCVHSSVSPERAGDTETLKDITAQDSADIIFLIDGSNNTGSVNFAVILDFLVNLLEKLPIGTQQIRVGVVQFSDEPRTMFSLDTYSTKAQVLGAVKALGFAGGELANIGLALDFVVENHFTRAGGSRVEEGVPQVLVLISAGPSSDEIRYGVVALKQASVFSFGLGAQAASRAELQHIATDDNLVFTVPEFRSFGDLQEKLLPYIVGVAQRHIVLKPPTIVTQVIEVNKRDIVFLVDGSSALGLANFNAIRDFIAKVIQRLEIGQDLIQVAVAQYADTVRPEFYFNTHPTKREVITAVRKMKPLDGSALYTGSALDFVRNNLFTSSAGYRAAEGIPKLLVLITGGKSLDEISQPAQELKRSSIMAFAIGNKGADQAELEEIAFDSSLVFIPAEFRAAPLQGMLPGLLAPLRTLSGTPEVHSNKRDIIFLLDGSANVGKTNFPYVRDFVMNLVNSLDIGNDNIRVGLVQFSDTPVTEFSLNTYQTKSDILGHLRQLQLQGGSGLNTGSALSYVYANHFTEAGGSRIREHVPQLLLLLTAGQSEDSYLQAANALTRAGILTFCVGASQANKAELEQIAFNPSLVYLMDDFSSLPALPQQLIQPLTTYVSGGVEEVPLAQPESKRDILFLFDGSANLVGQFPVVRDFLYKIIDELNVKPEGTRIAVAQYSDDVKVESRFDEHQSKPEILNLVKRMKIKTGKALNLGYALDYAQRYIFVKSAGSRIEDGVLQFLVLLVAGRSSDRVDGPASNLKQSGVVPFIFQAKNADPAELEQIVLSPAFILAAESLPKIGDLHPQIVNLLKSVHNGAPAPVSGEKDVVFLLDGSEGVRSGFPLLKEFVQRVVESLDVGQDRVRVAVVQYSDRTRPEFYLNSYMNKQDVVNAVRQLTLLGGPTPNTGAALEFVLRNILVSSAGSRITEGVPQLLIVLTADRSGDDVRNPSVVVKRGGAVPIGIGIGNADITEMQTISFIPDFAVAIPTFRQLGTVQQVISERVTQLTREELSRLQPVLQPLPSPGVGGKRDVVFLIDGSQSAGPEFQYVRTLIERLVDYLDVGFDTTRVAVIQFSDDPKVEFLLNAHSSKDEVQNAVQRLRPKGGRQINVGNALEYVSRNIFKRPLGSRIEEGVPQFLVLISSGKSDDEVDDPAVELKQFGVAPFTIARNADQEELVKISLSPEYVFSVSTFRELPSLEQKLLTPITTLTSEQIQKLLASTRYPPPAVESDAADIVFLIDSSEGVRPDGFAHIRDFVSRIVRRLNIGPSKVRVGVVQFSNDVFPEFYLKTYRSQAPVLDAIRRLRLRGGSPLNTGKALEFVARNLFVKSAGSRIEDGVPQHLVLVLGGKSQDDVSRFAQVIRSSGIVSLGVGDRNIDRTELQTITNDPRLVFTVREFRELPNIEERIMNSFGPSAATPAPPGVDTPPPSRPEKKKADIVFLLDGSINFRRDSFQEVLRFVSEIVDTVYEDGDSIQVGLVQYNSDPTDEFFLKDFSTKRQIIDAINKVVYKGGRHANTKVGLEHLRVNHFVPEAGSRLDQRVPQIAFVITGGKSVEDAQDVSLALTQRGVKVFAVGVRNIDSEEVGKIASNSATAFRVGNVQELSELSEQVLETLHDAMHETLCPGVTDAAKACNLDVILGFDGSRDQNVFVAQKGFESKVDAILNRISQMHRVSCSGGRSPTVRVSVVANTPSGPVEAFDFDEYQPEMLEKFRNMRSQHPYVLTEDTLKVYLNKFRQSSPDSVKVVIHFTDGADGDLADLHRASENLRQEGVRALILVGLERVVNLERLMHLEFGRGFMYDRPLRLNLLDLDYELAEQLDNIAEKACCGVPCKCSGQRGDRGPIGSIGPKGIPGEDGYRGYPGDEGGPGERGPPGVNGTQGFQGCPGQRGVKGSRGFPGEKGEVGEIGLDGLDGEDGDKGLPGSSGEKGNPGRRGDKGPRGEKGERGDVGIRGDPGNPGQDSQERGPKGETGDLGPMGVPGRDGVPGGPGETGKNGGFGRRGPPGAKGNKGGPGQPGFEGEQGTRGAQGPAGPAGPPGLIGEQGISGPRGSGGAAGAPGERGRTGPLGRKGEPGEPGPKGGIGNRGPRGETGDDGRDGVGSEGRRGKKGERGFPGYPGPKGNPGEPGLNGTTGPKGIRGRRGNSGPPGIVGQKGDPGYPGPAGPKGNRGDSIDQCALIQSIKDKCPCCYGPLECPVFPTELAFALDTSEGVNQDTFGRMRDVVLSIVNDLTIAESNCPRGARVAVVTYNNEVTTEIRFADSKRKSVLLDKIKNLQVALTSKQQSLETAMSFVARNTFKRVRNGFLMRKVAVFFSNTPTRASPQLREAVLKLSDAGITPLFLTRQEDRQLINALQINNTAVGHALVLPAGRDLTDFLENVLTCHVCLDICNIDPSCGFGSWRPSFRDRRAAGSDVDIDMAFILDSAETTTLFQFNEMKKYIAYLVRQLDMSPDPKASQHFARVAVVQHAPSESVDNASMPPVKVEFSLTDYGSKEKLVDFLSRGMTQLQGTRALGSAIEYTIENVFESAPNPRDLKIVVLMLTGEVPEQQLEEAQRVILQAKCKGYFFVVLGIGRKVNIKEVYTFASEPNDVFFKLVDKSTELNEEPLMRFGRLLPSFVSSENAFYLSPDIRKQCDWFQGDQPTKNLVKFGHKQVNVPNNVTSSPTSNPVTTTKPVTTTKPVTTTTKPVTTTTKPVTIINQPSVKPAAAKPAPAKPVAAKPVATKMATVRPPVAVKPATAAKPVAAKPAAVRPPAAAAAKPVATKPEVPRPQAAKPAATKPATTKPMVKMSREVQVFEITENSAKLHWERAEPPGPYFYDLTVTSAHDQSLVLKQNLTVTDRVIGGLLAGQTYHVAVVCYLRSQVRATYHGSFSTKKSQPPPPQPARSASSSTINLMVSTEPLALTETDICKLPKDEGTCRDFILKWYYDPNTKSCARFWYGGCGGNENKFGSQKECEKVCAPVLAKPGVISVMGT

SEQ ID NO: 11 - DNA, 2327 bp, Homo sapiens
gacgtttgggctcgcggccccagcctcccagctctcagggcacggccggtctgtgccggctgctcccgcggttaggtcccgccccgcgcagcgcgcgcagcctgcggagccagcggccgtgacgcgacaacgattcggctgtgacgcgacaacgattcggctgtgacgcgagcgcggccgctcccgatgcgctcgtgccgcccccgccgtgctcctcggcagccgttgctcggccggttttggtaggcccgggccgccgccaggcctccgcctgagcccgcacccgccatggacaactacgcagatctttcggataccgagctgaccaccttgctgcgccggtacaacatcccgcacgggcctgtagtaggtacgcggcggcgggcgggaccccttccgggccccctcctcgtgctccgcctcgcgacctccccgctgccctccccgcgcgccttccccggcccgcggccctgaccgccccgtgtccggccaggatcaactcgtaggctttacgagaagaagatcttcgagtacgagacccagaggcggcggctctcgccccccagctcgtccgccgcctcctcttatagcttctctggtgagagcctcgcctgtggggacagcctgggacgcggggaggatggggtcgcgagggtgtggcaggggggccggtcgagagcggcactggagaaaggggagggaagtctgggggggcaaacagttctgtctcctcctttcaatccagacttgaattcgactagaggggatgcagatatgtatgatcttcccaagaaagaggacgctttactctaccagagcaagggtaaggcaggggttgggtgggcacgctggcaccttcacccgacttcgtcagggaccccgctcacagggaggacctgagacctcagtcccaaccactccagcagccttaggagggagaaactgttacaggtcccgaaatgggattcagattagggccatcaggccaggcggggcacaccgatgccccctctgctaccgctgccccccttcccaaggctacaatgacgactactatgaagagagctacttcaccaccaggacttatggggagcccgagtctgccggcccgtccagggctgtccgccagtcagtgacttcattcccagatgctgacgctttccatcaccaggtgagctggctggcaggcgtcctgtacttgggtacaacctaggggatcgcggctgtgtttggataaatccaggggggcactgggtacaaatggtggctcttgggcctccggggagactctgtgtgactagagcaccctggtctgggatctaggctcagactcttcctgagagtcctgggggcaaaaggggatgctggggcatgagcacaagtggcaaggccccatggataaagggctgaacacccagagccattcaggagggtgtgggttcctggcctctaaccaaaggtcagaggggactggctggggaagtttggactgagggacatgacagggccatggtggccctgccagccagtcccctcgccctgactctcttctgcaggtgcatgatgacgatcttttgtcttcttctgaagaggagtgcaaggataggtgcgtagtgggggagcccagggacgggctggttctgggtccaggctcctggcccacttgctcccctcttttgcctcagggaacgccccatgtacggccgggacagtgcctaccagagcatcacgcactaccgccctgtttcagcctccaggagctccctggacctgtcctattatcctacttcctcctccacctcttttatgtcctcctcatcatcttcctcttcatggctcacccgccgtgccatccggcctgaaaaccgtgctcctggggctgggctgggccaggatcgccaggtcccgctctggggccagctgctgcttttcctggtctttgtgatcgtcctcttcttcatttaccacttcatgcaggctgaagaaggcaaccccttctagagggagccatgagggtctgggcttcagagctaggtctttggggaagtcctggctgactgccttagcagtgggggtgggggtgggggcaggggcaggggctttatgtgtttttgcttggggggcgctgggcctagcccagagtagtgcttgctccccctgccttgtcccaccagggaggcagcagactcaggccctccatggtcctctttgtcattttgttgacatgcattcctccttttgtcatcttgttggggggaggggattaaccaaaggccaccctgactttgtttttgtggacacacaataaaagccccgtttatttgtaa

SEQ ID NO: 12 - protein, 254 aa, Homo sapiens
MDNYADLSDTELTTLLRRYNIPHGPVVGSTRRLYEKKIFEYETQRRRLSPPSSSAASSYSFSDLNSTRGDADMYDLPKKEDALLYQSKGYNDDYYEESYFTTRTYGEPESAGPSRAVRQSVTSFPDADAFHHQVHDDDLLSSSEEECKDRERPMYGRDSAYQSITHYRPVSASRSSLDLSYYPTSSSTSFMSSSSSSSSWLTRRAIRPENRAPGAGLGQDRQVPLWGQLLLFLVFVIVLFFIYHFMQAEEGNPF

SEQ ID NO: 13 - DNA, 27632 bp, Homo sapiens
tggctcccatcggggaatcaacacgaggtctttatgaatcgccacccagccctgccaggcatctgagcaagggtacccgccacccagcagccactgatcagccttccacaaagctgcagaagagggctttccccagcatccttcctcagctgcctccaaaaggggcctgggccagggctgaggggcaggcaggatgtggagcgggcatccctgtgtgcacggccccatcccacctctctgcacagggtgaagtgcaggcaccctgcacttgctggacagggctggagagaagcaagggggctggggagagtggccggtccagcgggtagccgccgggggcacgcatctccagcagcggcacctcagtgtggcttgggggtcgtgtctaggccctgggggtgggaagctgagggtgaggctggggccccagggccccgggagaagcctttgttcctgcccaggcggctgctgggcggggcctttgggcttcggggcccaggactgggagaggtggtagatgctggcccaaggccctggcggacagaggtctttcccaagagctccttaaacacagagtccatgttctgtgccacagcctagcggaggggaaagaaagggagagtgaccagtgagttcccccgactgaccctgcccaagacccacctgagttcctcccactcccaaagcaagccctcagccaacatccccagtccctcagcctccaggtcactctcccccactttgcacctggcatccctcctgtccctgttggtgtctctgtcacagtctcctctgaggacagcaattccttggtttagcccggaagtggggacccccctcttctcgcccccactctttccctggcagagatcacagccccctgcccatggcctcagggaccgccagcgtgcggggactccccagtcaatgtcctcccatggcgtctcctggctgccctgtccctggctcccgctcctgctcctccgtgtctaccggaccctccctgggctccctgggcctgggggcttggccacacctgggacacccgcatgttcttgggctctctcctccttgggcttagcaactgtcccgcgggcttccacgttcagcccgacagtgttcacagggcccatggtacagagcacggagcagggtcccccaggttgtgcgcttgccagggccacatcttgagccttcgctctgctccttcgagagccgctgctgccccaccccaatccccaaccagccaccccctcctgcctccctgccatctgtccctttcatcctccctggcgtgccaagcgcctgccatggcaccgcctgttacctagcccagctacaaatgccagccttgaatctgccctggagtcccttgcctctaccaggtaaacagccttaactcagccctgccactccctgctctgaagctgaacatgaatcccaacgtgcaagccaggtgtcttctgtccctctcatccctgcctccgtagccgtccctctccatccccacccgccctcacatctttgccttcctgccctccacaggctctgccttgggcctgtgtgtctggcggcaggttcccttgagctaaggccagggagggcaacgactggaacctcgaggagggaggagtttggcttccaaggggaggcagagatcccccaggacagatgtccctcacctgccacacacccactctcaccttatccacctccacgtgttgctctggggaggctgggaccaagcagcgtcgtctgtgtccagagggtcccatggcctcaggtgaggtgcatggctctggcctgcaggacagacagggagcctggtgggggccctgggaagtccctgagctagctgggcagtggctcctcccatcctggggtgtggccaaggaaaggaggctggcccagtggtccccaagctcctctagagcctctccctgtcacaagctgggtcattctgtcacgtcctcatctgccaactcctcccactcccactggccaaagcctgaccccagtcccctctggcctagaacagcacacgtgtggccccctgagccccgtcttcttgctcaccggtggaccagctccgatgccaggaggccctcgggactgctcccagactcccctgcagtctgcagccctgcgcccaccacctgcttctccgtcctgcggtgggaaggaccggcctgtttcgagtgctccttccctgcacggggtccagggccagcagctccgcgccagccaggagtggtcagagaggctctgttctctggcccagcccagaccttcagaatctaacttggggtcgggggaggggtggatgaaggggagactccgggagccctggggcctgagggcgcggctcactcacccggcgggcagcgtgatatacttgtgggggatgaggccccgcatgccgttgtgctccccccgccaccagtcgctcgaggccctctcgtgcagccgcagtacgtccccccgccggaagctcagctcctgggctgtgcggcccgtgtaggcaaagcaggccacagcctccacgaccccctccaggtctggggaggagagggggtccaagctgtgggagggggtgtggacactagggtggggacagggtggggctctctgcccatcgccctcaccatcctcctgtgcgggcatctcggcttccagctccggctcattgtccgcccccaggctctccagctgggcgtccctgaggttcagggcagagcgaggcagatgaggggggctcttctccagtggaccccccagtcccctcggcagcaccaagggtgtaccccaggcagctggcggaaggcggtgccatgcacttctcgtagacggggccaggcagcgaggtcaggggcgggaagacccgatcgggctgcactatgagcgtctgcaccagctggttcacccggccctgcagcgccaccgggtcctgcccagcgggcaccggtagcagcgtgggcccgaagcacacggccaggttgtaggggtccatcatgttctcatcgctgtactgggccaggctggggggacacgcacatcacaagcagagagcccgcaccccgagtccccctgtcccctcgacccctggcccccaccccagcactcgccccgcagcactcactggttgaggaaggtgaagaggtagcgcagaaccaccagcaccggcgcgggcagccgccacagcaggcggctcacgtgctccaccctctccgctgtggcctccagctctgtggccaaagccgcccagagagagccgcgtgagcggggctgccccagcaagtgccctaccccgccagcctcaggccccagcctcacccgaagaagccagcagctcgccgaacaggtctggggggaagagtgggggctccaggctccggaagtagagcttcagcaccccggccaccgagtccaggtcatgggcagtgcagccctccaccagtgggtcctcccctgcagatgggcgagtggtgcggtagggggaggaagctggtgacatctgcccgagcccccacccccgcccgccctgcccgtccccacctctctcgaaggcatcacggatctctgagacccggagctgggcacccgatacccggaagatgccttcatgctgcaggcctgtgggaggacaaggagctggtgggcactgagcatcttccccagcccctccaggatggcctcccatgccaggtgctgggaactgggtgctgggtgccaggacatcgggaggggctgggtcctgcttaccattgaggttgatgaagcgaatgcagctctccaccaccaggggcacaggctggcctgagctctggggacagagggtgtttacttcaccatggacacagcatgccctgtgttgtcattcaattgctttttttttttttttttttttttgagacaaggtctcactctgtcacccaggctgaagtgcactggcgtgatctcggctcactgtagcctcagcttcctgggctcaagtgatactcctgcctcaagctccccaatggtgggattacaggcatgagccaccgcaccaggctgagtgcttttattttctctgaagaacacatcatcgttgtcggcacagaggcttagcacaccgtttgttagatccactcgtaggtgtctgatatttttgatgaggttttaggcagtgccttacgttgtatttgcaaattgttgctggaatatacaaatgcaattgaattctgtacaccaatcttgaatcaagtaacatttcaaaactcaagctgggtgtggtggctcatgcctgtaatcccagcactttgggaggccaagggaggaggatcacctgaggtcagaagttcgagaccaacctgaccaacacggtgaaacctcacctctactaaaaatataaaaattagccaggtgtgatggtgcacacagctacttgggaggctgaggcatgagaatcgcttgaaccccagcaggtgggaggtgaaggttgcagggagctgagatcgtgccactgcactccagcctgggcaacagtgcaagaaccagtctcaacaaataaaaaaaaaaaaaaaaagaaagaaactcaaagtgctcgtttaaagaatctgttgattcttttgaatatgctacacgcataaccacatcactgaaaatgacgatatcagttctgatcttctggtattctccatgcctggccctctctgatgcttgcttgcttcttttcttttctttctctctcttttccttccttccttctttccttccctctctctctctctctttctttctttcactgggattacaggcacgtgccaccatgcctggctaatttttgtatttttagtagagacggggtttcaccatgttgcccaggctggtctcgaacacctgggctgaagggatctgcccacctcagcctcccaaagagctgggattacaggtgtgagccaccgtgcctggccccctctgatgctttctgatctcagtattagttttctgatctttcttgcttccccttatttcactgtccaggacccccagtaccatgctggccagaagtcgcaggggagaagctctcaatatctcgcccctaaaaatgccgctgccccaggttttctatacgttcccattactagttaaggatgctcccttcaatcagcggaggctataggggagcccaacagtggcctggaagaggcccacccagaaaaggacagttgatgactgattgagagtggaggaccctgggatcaggcagctgctccggccactgaggtgacccagagctgaagaaagatcagcatgtacaggtgggctggcatgtggggcaaagctagtacctggataaacttctccatgtctcccccaaagagtctctggttatactgggagctggggcggggctggcggctcttctggaattttctctgtgtgtactgggtcctgcagtgaatgggagctggctctgagggggccaggtgtggagaatagggtgccccaccccccaggccagccaagccggcctctaattctctgaagttattccacaatccagtgcgaaaactggggaagtgaggcccaggggattgggcagctgagctgggccccaggaagagaagagatggcggaccgtcgcagggccccagccctcagggaggactcaccaagacacctcctgctcctccttgtcacctgtggggtgggagaacattggtctgcctctcgggccaggggtcttcaaggcatcccagagagaaaggtgtggataagagccaaggacaggcgggaggggaggaccgtgggctagacagggtcctgggcaggggagaggcggggaagggggcagcactgggcccacctcgctgaagggcctcctgcagcttctcgtgcttggcctgcagcttggcgaggatgctccgtccactcagatactcctggagcttctgggcagccccaagaagagccccaagtgttagccctggcttgagcccctccctctgccccagcaatgcccccacgggtcccgcccaccagcccagccctccccaccgtgaggtagaaggtttcggtctcctgctgctggccgcgcctccggcccgcctgccggctgcctgggtctgagctggtggacttgagggactcggtggaggggctggtctggaaggaatcaagcacatccccgtcatccgaggccaccacctccagcagggcctgcagtgtcgccttcagagtcttgttcacctgcagaggagaccacaccagggtggtaagaggtgggggacagggagggagacaggaagtccaagtcagaaggaaggggccaaagggaggggggcaggcagggcagccacttccaacagcaggctgtacaggctccaggccctcgtctccctctaacccccggtgggctgcccagacctcctctgtctcaatggtctgtcggtccaggcggctctggatgttctgggctctgggcagaatctcgtcccgcagctccatttcaacgcagatctcagccacctgcagagggcggcggccagggggctaagggctgggcttgggcagtaggtgccaagatccccggggcataagggaagcaagcacccttttgtggcctggcggccgggcacaggaccaccagcccagacgctcagctgaagaatggcaggagtgaacacacgtgtccaaaccaagacttgtccacagaggttcgtggcggcaccactcatccaactgacggatggctaaactcagcgcggtctacccacagaatggaagaggattcagccacgagaaggaatgaatccacttatgtgaagtgtccagccaggcaaatccatagagacaggaagcagagtgggtgccagctggagcagtggggtgccagtggggctggagaggagaacggggagtagtggctcctttaggggtgacaaaaatgttctggaattacatggtgatggctgcacaaccaccaaattgtacactttacagtgctgaattttatggtatatgaatcgtaccttaataaaactctatttaaaacagaatggtggcccggcgcagtggctcacgcctctaatccaagcactttgggaggctgaggcggatggattatctgaactcaggagttggagaccagcctggccaacacggtgaaaccctgtctccgctaaaaatacaaaaaattaactgggcacggtggcatgcgcctgtagtcccagctacttgggaggctgaggcaggggaatcgcttgaacccgggaggcggaggttgcagtgagccaagatggagccattgcactccagcctgggcgacagagcgagacgccatctcaaaataaaataaaatgaaatagaatggtaaggaagactggggtctgagacagaacagggagagcccagccccacctcttccagggaaaggagtggacggaaaaactgctcactgtaactgggcagacataaatttccctgtggcaagatgagagcagcttgcctcatgggcagagtgggagccaacgctttagaaaggaaggaattactcttttaagcatgtagacatctagaaaattgacattacagttaaaattgagagtgaggattcagctgtggctaaacacttgccctgctctccatctccaccaagccccgccgtacaggactgcatgaaggcgcaagtcacagagtagaaagtaaggccattttgagatgggctccaacatggctgacccttgaggacatgggactcagtgaaaggagccagtcacagaaaggcccgcactgtaggattccactcctgtgaggggcctcaaaggagagccgtgaactctgtagagacggacagtggaagggtgggtgccagggctggggggtggggagttggggttgaacggggccagagcttcagtttgggaagatgaacaagttctgcggctggatggtggtgatggctgcacagcaccgtgaatgtgcttctgcccctgggccgcacacttacaaatggtgaacgtggtatgttttatgctatgtgtattctgccacacctttttttaaaagtccatctaggctggactggctcacacctgcaatcccagcactttgggaggccgaggcgggtggatcacttgagcccaggagtttgagaccagccttggcaatatggtaaaaccctgactctaccaaaaatacaaaaattaccctgtctcataacctggtctcaaaataaataaataaataagtaggttaaaaataattgtttttaaagtacaaatcttagccacgcatggtggcatgcacctatagtcccagctactcaggaggaggctcaggcaggaggatggcttgagcccaggagttggaggctgcagtgagctatgatcacaccactgtactccagcctggacaacagagccagaccctctctctagagaaaaaataagtgtatgcatactctggggaacattgaaattttatccctcctctaaactcacacgatcagcagaaaactaacaatttgctctctggaaaggatatagcagggattttggactcagggacactggtcccagatgaggaagatgagagaacacagcagccccaccatcggaagctggcctggtcctatcagcccggcctcagtgctgtcctgctgaacaccggaaatgacccagagcatcaacatcaggcaaggccactgtgtgaccttgatgggcgaagacagaaacaagaccactctgcgatcacgcatgagtgaggacaaaatcaagaacttcttccgagccacaaaatcatccctccatcctggctaatgtaagtgactgtcacttccttgcatcacttcagcctccatcactgtctctttctagataagattaatcaagacatccaatcatacaattaccctgcttccagaaggcatccaatccaggaccaagccccacttacctgggccctcccccagatcccctaaggcaagcccaagtcctctaaggcctttccactaccctctcactgagaggccccaggctccccacggagcagggctccctccagcaatggagattatagggctgttcctgctaggctttggctggagggtgtggaactaaaaccaggtagttccaaggaaatccacacagcagagtgagcccccagccctctcaccccctctcctccctagacagggtcagaagagtttctactggggaaactggccgggccaggaggaaacaccacagacacccacatttgtggggtatgtgttcaggcctcttcttaaatatgaactgatggccaagaatcaccaaacagacacgatcagcagaaaactaactatttgctctctggaaaggatatagcagggattttggactcacgaacaaaagcaagaaaatagagcaaatgcaggaacaggagaaaacaaaaaacatttcaggccgggcatggtggctcacgcctgtaatcccagcactttgggaggctgaggcaagcagatcacctgaagtcaggagttcgagacaagcctggccaacatggtgaaaccctgtctctactaaaaaataaaaataaaagggtcgggcacggtggcccacacctgtaatcccagcactttgggaggccgaggcaggcggatcacctgaggtcaggagttcaagaccagcctggacaatatggtgaaaccctgtctctacttaaaatacaaaaatcagccaggcgtggtggcgggcacctgtagtcccagctactcaggaggctgaggcaggagaattgcttgaacctgggaggcagaggttgcagtgagccgacattgcgccactgcactctagcctgggcgacagagaaagagtctgtctcaaaaaataaataaataaaataaattaaatttaaaaaattaaaaaattagccaggtgtggtggcaagtgcctgtaattccagctactcgggaggctgaggcaggagaatcacttgaacccaggaggcgaagtttgcagtgggtcaagatcgtgccactgcactccagcctgggcgacaagggggaaactccatctcaaaaaaaataaaagcttcagaaagattcaagaagtactgtattcatgaaataagaataaagggttggccgggcacagtggcacacctgtaatcccagcactttgggaggccgaggcaggccaattgcttgagcccaggagtttgagaccagcctgggcaacatggtgaaactcccttgctacaaaatatagaaaaattagcctggcgttgtagtgcaggcctgtagtcccagctacttgggaagctgagatgggaggaccagaaggttgcatctgcagtgagctgagatcacatcacacccctgcactccagccgaggggacagagtgagaccctgtttcaaaaacaaaacacaacaaaacaaaacaaagaatacagacattttcagatgtgcaaagtcaggaaacccttggtgaaggtgtcaccaaaataagggtatcaaactaagaaagctgctgccgtggaatccggaaacagagcactgggcagaagtgaagcactccagactggaaggctctgggggagggcgcagaggagaaggttgacctcacaggtgcctggtgtggaggacagtgctgggacgaggtagcgatcaactcctagcaatgggcatgttctagcaagcagcattcctgaggcaagagagttataaattccagaagaaaaggaaaaattgtccaaggaaggacatgtgatcctaatacagtacatggctcagctgccaacagtacctgttgtcatggtgatttaaacattgaatgttaatttagccaaaaattctgggataagcccactgggagaacaagatgcagggaagcgtgtggtggctgtgagagatgctggtggcactgggtcatcattggccaatggaaaatggctgcttgacaccgggaggtgggtggctgtttctgggggtgggagctgggaacgggaggggtgggttagggagcagctgtgacgccatcggaagccctggtgatgccggactcttcgtaaagttccaagtcggcccgaaaggggcccaatgtaatcccagatcattgacaatgcccatcaggataaactgctgcaggaaaaactagctcgacggagaaggataaagaagccccattccatcttactgccaagtttgtgtcacgaaatttaaaaacacagagaaaccagcctagaacaatgtatgggcagctacacggctgcctgctgcacggtttgaacagttagtgtcttgccctccttggccattgcgggggtgcacccttggagtgaggctgcaaatggaagtgggacacttctctagctgccgcactgcctgagaccatggagaacttggattcctgagcaaagtgtgggtcatgccactccactgcccaccattacagtgaaggccagagaatgccaagcccagcagggggtgaccctcacctcatccccatcatgggggtggtagtcaaagcgcagcgggggacagaagacggtagcatgcacctcgagaaccttggctttgtcccctggaggatccagggcctccacagcttcttccaggctgcccaggccctgcacttgggaggcttgggtgcggctctcagcggccgtgtagctccggagcacctgccccagggccaggtggaaccctgtgtcacagcactgaggaggaaacaaggagatgcttgggtaggtcctggagccacagcttcccagccccgaggcaccaggcaccttttcccacctgcccaccaaggactcacgtccatgaggtccaagacgtcatgcaggtagtagttactgacagcagcgttgacactagccaggctaagcaggtactcgttgcgcgcctttgtgcacttgagtttgtgctccatgaacttggcctgccgctactcaagacaatgcaagcgtgccagggtcacgcacgtggccagcccctatctctagcctttcatgtaatgcccatcgcctcccctcccactgtggacaactacacctgaactggtcaagcccagaagtcctgctgccttccccacgccacagtccacagtgtgctcagcccagtgccaggaggtgacttgattccccggctgttcacccgccacttgccttggttcgagccacaacattccccacagaagtgggggatgacacagaactattcacagatacctgatgagtggaaggtgcgcacatggcaccccaccatggagggtgcacgagaaacccagcttggagccagcacacaggtgcacagctggaagcggccacaggcctctgcgggggccagagctgagggggaacgagtaccccaaagggtagggatagatcatcaagagccatgaaacagaacctgctggcacctgggttctaaaactggcactctattttttttttattttttttttttgagacagagtctcgctctgtcgcccaggctggagtacagtggtgcaatcttagatcactgcaacctccgcctgctgtgttcaagtgattctcccgcctcagcctcccaagtagctgggatgacaggcacccgccatcatgcccggctaatttttgtatttttagtagagatggggtttcaccatgttggccacactgatcttgaactcctgacttcgtgatccacccacctcagcctcccaaaatgctaggattacaggcgtgagtcaccgcacctggctaaagctggcacgctaaccacagcagccagggagaccttcccccaacacagccaaactctgtcatttcccctaagaacacctgagatgctcgactccctcctctgctcccagagtcccagagaccatgactgtcagccacgcacagcctggcggctccatccaggcatttcccagcctccccactctctgtactgggctcacctcgaaggccctttctccgtgcgtgtcaccccatcacccaccctaagtgtcttcttgcccccctctgaaaccttacggaatggctggcagaacagcagagctgcaggggccccgctgggagcatggagaggctgcatggggctgtccagggccaggcaactgttttccccactctctcaggccctgggagccttccgtatggaatccctggaacctgatggcactgtcctgccactcctgccctcccctgcacccagccctgacttccccctcagcacagcaggtcctagttagggcccatggcccataggcctgcgtctgaggtgccctccaggcccaccttctccaccagcctccctcccttcttgagggagctcttgcggaggggccctgcctcagtggcaccagcggtggtggtggggacactccggcctgcccgcttctcctcctgccgctcggcctcccggagcttggcctcggcattcacgctctccatgtgatatgcctggtacgtcttcttggcctgcagggagacccaaagcaaggtggtgctggtgaaggccacggctgggccagcccccagccctctacccctgcccctctggaacttggacctcagagctgggcgatcccatgtgagcacttagcctaacgccctgtgcctagggagagaggcctttgcccctaggtgcgtgcttctccctgagcctggcttggggtgatgtgatggtctggcggtgttcctccccactgtgagtggcatttctccctggaccattggggcaggcccctccccagccctttcctcaccgtctggagctctgagaccacctccaggagctcatcctgcagctgctgctccagatccctgctctagaggcagaggcaagggtgagcacggcactgcccagagcggccccgccaggcactggaagctctgcccagatcaagccccatcgggggggcacacaggttcgctctgcctgctccccacctggcctccagtgccctcccagccacagtgcctcctgatcccaaagcctcgaacacttcccgtggcccaggatgagagcctcaccttcttgaccaggcgccccacgtcctctgcaatgtgactcaggcgctgggccaggggcccggccagcacctcactcagggccgcgctctcccggctctgctgccgcgtgtgctgcagcagcaccgcccagcagtgcaagggcgacaggagggacggctccttcctgggggtagaggggcactgagacctgggagcggagcttgggccctgccgtggcccccctgccagcacatcacctaccggaagctttggtgctcccggctgctccccaggcggcctccacggctggagaagcgctcggccagcttttccaggccccgggagtattccagctccacctcagcgcggcgccgcatgaactctgccagctcctgcagcaactcccgccgcagctcgccctgcagctccaggcagcgcagctgctcgctcagctgccagcgcatctctgtggggggaaccatggctcaggcctggtcagcacgccctgcctgggtcagccaggccagcgtgggatgggagaggcagaggcacacagaccccagtcccgtcggctctgagggctccttcggacccagcctaggctgagggcaagagctaagaggggaggaaagaagctaggcccctgcaggcagatctggcctcagctgtccagccgacctctgcgctgaggccaacagatggccagagccacccggttgagggggaaggggaagggtgtcccagagagaggggagagccgccccagcgccagccaggcacctttcagtttggcttcctgtctctccctcgttcctggaaagcctctgaatggtttcccctgcgacttcctttcccgccggtacccaggctccgggaggtggcagcctcccttgcaaacacacggatacacaacacacagatcacagtgctgctcagggcaagcctgcagcgatctcgcagtctcagtggctggggaagcctgccctcaggccccaggggaaaggacagtccacagtgagggctgggagccagggagagctgatccggccttgtaagtgaaagaatggggcagggagctagcccccgtcttctgaccccacttcccactcccaatcaccccccgccccacctgtgcattcccccaccctgcagagagagtcacacccagggccccatactgccggccttttgacaccctatcactggcttgatttggcaacgctgcttcccccacacaggcctgaagcaaagaagtgcctgtccagcaagtttaagcaacctgcggaagacacttttgccatctcctgagtgcccgtcccgagtaaataagatgctagctcagcttctggccagcaggctgcccacctactcatctccatccacatccccagggagggacatgaattgatgtcttcattcagcagaatgttgattatgcacccattctgtggcaggcacgttttaaatacaaaggcaaagaggtttgaccaagtgtctgccctcttggagctgggattggaatggggcacgaacacatatcagaatgcccaggagtgatgggtgcggagaagatgaacccacaaagcaagatcagagccaggggtgggtggggacagggaggacctctttttaaaggagggtggtcaagaacaagccgcatcgttggagcagaaggctggagctggctgtacgtgggcagtagggggagtccgagagaccggtagggacagatggcacagagcccggggtctgggcagagctcccagctggactccgagtgagagaggagccacagtagtggggtgatgtggtccagcttcgttttcagggccccctcacactgccaggtggagcccaggtggcagctactgtgctagtccaggcaaaagacggcaggattcagaccagcagcagcgagggaggactccgctgagaagagctcaatcccattggatttctgtcccgccagtgacttcccaggggctgttgcatggggaccctgtgggttccgcctgcccagcatccctacctcctcccctgatctcctattggagaatgtccccttcctagtctcagcccccttgactccaggtgccccagccctggctgcatgcgtcacccatccctctgtccctccactccctgcccccaccagactagccaggtgagggacccaggagcctgacccttccaattgaattactgaacaggagagctcttcccaccggcagatcaagctgggtaagtggaagcctggggcacgggacctcccgacagagcagggcagagcccacgatgccaagtgagacagatggagagtgtcttcatcctatccgaggctggcctcctgtggttaactcgtcagctccaaggccaggtggggtgggcgctaatgccatttgaaatcaggagagtcctcactgaatcagtttaacgttttgttttgattttttgttttgagacggaggatgttgcccaggctggagtacagtggtgcgatctcggctcactgcaacctccgcctcccgggttcaagcgattctcccgcctcagcctcccgagtagctgggactacaggggcgcaccaccacacccagctaatttttgtatttttagtagagacagggtttcatcatgttggccagactgggtcttgaactcctgacctcaggtgatccgcccgcctcggcctcccaaagtgctgggattacagacgtgagccaccacgcctggcccagtttaacattttttgataaaagtaaatttcatttcattccaagaaaggtgttagacaactgctcgcctcactggccctctggagcctgccctgccctgcttcccccagaggaatacaatccctggggacttatgacaactgaacagtgcagaaggaaccagcagagggaaccgctgcctttcttcatcactgccggcagcaaaagctgactggaagccatgtcctagtccagatccgggcatgcacaccggctggtgttgagcaggcaacttgtgaattgcaagtcgattgcattggtggctttcctggcagagctttcggatctcagttcagacaaactcgtcagcacaccctgtcctgacctccccctaaactagggctggccctcttccgaccccttcttggcaccgtgcactttccttccctttgtagtgcttattatcataatgcaaagtctatgtctcccccactagacccgtgagccatgtgagggcggggtggccactgacgccatttgaaatcaggggagtcctcattgaatcattgcttttactctgggtaaaaagccagggctggaggggctggagtcggggttctctctggtacagcagtatactcccagggcctgggacagcacagatgtataggaaacatctggcaaaaggagagctggaatccatgtctgcctgaattacagagctgggccccgggccccaccagcacttcctgtgagcaaggcatttggtctcacttctgctgacaagcaaaacagaagaaaagatggtctccaaaaccaccgctatgctgacctttgagaatttagggtgtcaagacagtgaccccactttgtagaatggtaggaagcttttccagggtgtgggatgcagacccagagcaagtgaggaacccttagacagtcgtgctcgaaaccccaacttttcagtgtgaaatcactgacccatatttgctgactgaagttttccaagtctttcagcttcatggcattttggggaagcaggatggagatcattacctccatctgagcaagatgatggcgaggcttggaaagctggctcaccctgtgtagtcacctcaagctggctctggacacaggctgccttttccaaaggaggactggagcatactttggtataaattgcttgcactgaataatgatgttagaacctacatctctgggttcaaaggcacttcaagggtcattgcattctacgtcctagaagttgcagtgctgtatgaccacgggcaagtcactgcacctctctgagcttgtttccgtaattggtaaaatggagtgattgagagtgatatggacgagctgctggcactgagctgctgcctctttcctttgcaagagttaccatgccctgaataagatgggcacaagctattggctaagaatttgcaaagctgatttgcatgtgatttgcacatgggtgtttatcagaacccagaggttcaatttcagaaggctgagaagccagccctgttaaatctctcaaccaagactcactgcgccagcttgacccagagacagtggccctcgcctctgctccccctcagtgctaaagggaggcaaaaggtgctgaagctccagggactgcagtggggttacggccaggtgatctccaccaatccactcacccggactcccttactcaccccccagcccaatcaagctggttgacttcactgtagctaaaatactgccttctgaggggcacgttgggtgcatctggctctcttttaccagcggccaccagtgtctccactgaaccttgggtgagaagcggtagacccaaggaggacagagaccaaaggaaggaagacaggaaagaaggaagggaaaatggcaggcggttgaggccaaatgggcgtcgggaggcaggcaaggggctcaggctccctcctccacccccgctccagaggtcgctggggagagcatcgggccctgggccagcgcggggacgcttggagctccctcacgaccttgggttctccgcaggaaacgggccgggagcgcccggcgccctctcacctttgacttgcgtctcatactcagcctgcagcccccgctcccgccgcagcttcccgtgagcggccatggcggcctcgcggccgcgccgtcgaaccccactgctcccacgcggccgtgagcgggcccggcgccgggacttgggggcgctgcggccagcaccctgcgcgggctccgcccagccccgcccccagcgcggctcccggtggggcggggcggcccagggctggcactgcccgcgaggggctcctgggggggcagggcgccccttccagccccactgtgccccggccttgccgtcccctcccattgggcctgcacctaggctgccttgtgcccaaagccccgctgccaagcagccggagcaggtgtgagagccccaacgtaagctggcatcccaggctgccatcccaccacctccagaaggctgtccctggtcaccactgccagactgtaccattcacagcggggccgctggcccactgtaccagtggccatgaacaccattgctgccccaggctctggactccccctgggttgcctccttcccccagacatccgatggggtcctcccttcccaagtcagcccccagagaggcccagggagccccagggagccttgagagctggggtgggaagttcagaggggagggggaaggaaggtcagcaccagagagcagaacctcagcagctggctgccgttccctccaggcccccttggtaggggaggagagttcagctccggttccccttctgctcagccccacaatttccccataggcggttaccacttcctgctgccggaagagactgctctgcctcccttcccctgcagctgcacctgcccgtcataggcctgaggggggcagccccctcggagtgaggtcttagctaccctgggggcaagtcttggggcccccctcatccaggggtggtggggctttcctccaccctctaccacagggcagcagcttttctccgggaaatcgggaaggcgggaggcgggaggcggttgacaagccaagcagacaactggcttcaatttggtgggagggaaatccctggggtatagatgtggggagagaggcaaggcacttgggcaccaggcgtgtgttccgaaggcgggcgtgggggcactagtgcaggggtactaggcgtgtgtgtgcacggatgtcagagtcaggctctgtgcaaatgcgggcacacatgaccttgacctgcagatctggggaggggaggctgtgcgggtacttcctgcctttcaactgtgagcaattaattctcttgcccagaaggaaaaaaacactccctcagctccccgcccccttctcccagtaccaaggcccttctcgaacacgtcgtcgtgtgtgtctgcaggacctggggcttcaaggcctgggagctagccagacccaggacctggacttccagcagctggtctcggaagtaccgatgttcgagtcctccagcgagactagagagcctgcgcccctgcccacagcgcgtacagccgcacccacactccaacctgctcctggtcgggagactcacacgtcccaccgctgcctcaggccaaggggaaccagggagccccgcctctcactagctggccccaacacatcttgcccctccatccgagccctgactggtccccaaaggtccctccacccagcagagccagccacagggctcaggcaggcaggaaaggcctcagccggtgccttcaaacgctctcttcactccttttttcactccagagctattcctaggatgccccattcagcccgtactttagggcctgagtgttgggccctggcttttagggcacttgtttggcatttaaggccctgaacgcaactgccccctgctgctccgtctatccttcgctccattgttccccttcaaagcatccaaaagccaggcagcccgcagaaggcgcggacctgcccgcatggggacggaggctcagcggccgacaggcatcgggcccgccggggacggacggcagagggcgggccgggtcccatgggcctggccggggcggaaggagggcgccgcgggcgccgtgggagcctgggacacctcccttccaccggtgccggggcgcggccgacgcagtgcgcaagcccgcccttcccccgcaccctgcgcgcgagcccagtgccgccggaccaatcagagcctgggaacgaacctcgccgcgggcttgcgaaccggaagacactgccgccaggcgcggggcgggacaggactccgcctccggcccatacaaagggaagcccacgtcttaagccaatcaacacagcctcgcccgagccgggaagcggagagctgtgggcgtgcgcagacgcgcctttccggccccggccccgccctgccgcgctctgggctccgcttccacagctgccggctgcctgctggtcacgtgcgaggcgccagccaaagagaaccgagctccaggcctgtgtggcgagttttcaacccggcggaggagcagtgtgccacctgcagtagcaggacacagagagggctcaggaatacagggcccgcccaggactagggacagtaaatgatggctttgcagccggaggggagggaagggaaaggaggaaagacacagaaacgagcgttacggttagggtgactccatgaaaaacaggattttgatatatatgtgtatatgtatatatatatgtatatatatattttttttttttgagacgggtctctgtccctggagtgtggtggcatgatcagggcccacagcaacctccacctcccgggctcaagcgatcctcctgcttcagcctcccgagtagctgggattacaggcatgcaccaccacacccgggtaagttttctatttttagtaaagatggggtttcgccatgctgcccaggctggtctccaactcctgagctcaagtgatcccgcccaccttggcctcccaaagtgctgtgattacaggcatgagccaccgcacccaacagccgcccagttttgtattttgcatgaaattgttaatgagggaatacatggctttatgcatttgtgtaaccccatagaaactgtacaacacagacaggaaacctactgtaaaccatgggctgtagtttacaataacttatcagtattggcgcatcaacaataacaaatacaccaactaatacaaaatgtcaatggggaaacgcggggaattgtactaaaaataaattattttcaaatgcaaactcaggttagggagtagactcaagaggtatcatggactcactgaccattagggtggcaggggagggaggactcaaggactgttgatggggcatctggctgggtcattactcagacaggacatttgtagataagcccaatgagcagttggatgtccacatctggagcccacgggtatgctggggagctgctgtagcccgaagcaggtgtgattagggagagaaagtctgaaggtgaaggtgggaagagaactgaaggccaccaagagtgggagccctgctgttgagctttgagcctgagcagccccggcttgtgccacaaaacacattcagcgtggccaagcagacctccaaggcagggtctctcccataagtccagggcctccttccccggggccacagctgctgaaggtcatgagactagggagtcccacctccaaagctctttccttgtactcgggcctggcaggatgctctgggtcaaaaggccaaggctcacatccccaccagaggacctggagaaacacaccctctaaatgtgcgcgcgctcacacacaaagttccccagtgccacggagcgaatttattgtgaaagctcgtggggtgaggaggggatggggcaggctctaggaggctgagtcggaggcctctgagctgtccttgacatctgtgctctctgtggtctcgctgacctcgctgaggtccttgctgtccccaccactatcctcggcagccaggcccttctcctcgcgacaggcctctcctgagctcggaggtgaattgcctttgctctccaccttgttctcgatggcacccagcaccacgtgcctgcccttctctttcagctccaggtgccgcctcagctgccaccaggaacccagggagaagcgggggcaaagagacagggcctaagtttccagacaaagggagcctggccctgtcgctggctgaggagaggggcatagtgaggcagcagggctaggcaggacacgcgggactgagtggggacacctggctggagccccagtccaccgctacctgggcttaccgactaccatggaggcccccacgacagagcgctgccccttgaccagccctgccacccgatgagccttgggcagaaccctgactcagaactacctttgagcaggcaggccacccactggtccctagacctccccacttcccttctaaaagcctcctccctctgcctctcccatcaccctccaggctgctaggcagatggcctcctctaaagcccagcctaggaaactgaggtcgtgactcctggcaacgtagccacaagagctggcatccaaagtcggtctcgcctgcagccactgtcttggggctcctgagtgccgcccccgctcgccttgcttggcttcatgcaggcgcttacctcgtcggccatctgagtgaggtcccgcttcatggcataggcgtcctccccatctgcatagtatttgggctccacttcactgatcctgggggcagagggttagagagcaaggaggaagacctgtatcccggggacaccctcctccactcctggtatcgtggctactggagcaaggtgccatgttttctccctgaaggctccatcctgagacaacaagtccagtgtgacctgccctctgttctctccagcaaaggctccaggacacagcggcccgccccacccgtcctgcccccgttctgtgtccttagcctggatactaaggatccatttctgcggtttcttgtgagctgaagccctgaattcagccttccccttccctccctgccctgcgccctgtcccttactgagctgcctcacaacagccatcagaacccaggaaagacggtgagccctgcctgagcagctctggggccgtgactacactgggcaggtgtgtgtgcagactcgcgtggccatgtccctggaaggggagctggactcaatggcctaggctggccctgccaggcctaagacatgaggattgctgacttagctataaagcaattcccaccagacatcgtcatctgggtcacagatccctcttgccagcatccagcccagaggccaccgcccttcccaacagtccctcttcttcatcccctaccaaacgggctgagtgcagttagtgtccctccacaggcagcccaccccagcttcacttgcaagcacttttttccactgtctactgggcatgccaactgccaggttctctctagtgtgctaggcacacggggcctcctggtcctcaggcagacctcccccatccactaggctgcctggccactggcccttccttcctgaatgtgcattctcctcgattctgctctctcttggattcttctaggtgcttggtcatgcttgagtcctgctcctcagcatctgctcacgccagggacccacacctctctattcccaaacattactaaacagcccgtgtgcccttcgccagcctcagccatcatgggccagagctcctccatcacaacacatggagcacgtttcagcaggcaggtgctgtctccatgccggcttttcaaccatcagccgccgagtgaatgtggaggtatcctggcagtgctggggtccacagcctcttccccacagccggcccacccccgacctggaaggcaactcagccggtctcaggtgccctgatgggccagacctgggatcaaccccagcccattagaaaaatcgagatctacttactgaaagttgagggtgttggaatagaggtgcagggcggcccggttactgcaggggaacaaggcactgctgagctgcacggatttggccagggaggggtagcacgtccaggtcttgcccctcctcctggtccctccttccccccaatcccacttcctggatcttcaccaaaagctgaggtaccccaggacccccgtcaaggcagtatctctccccctcaatcccccttccctcagcccggcttccacctcttcctgacatgcagggagacatatttggcattgaagttctctatcatggctcgagaggcctggtccatcagtttctgagccagaccgaggcgccggtgggaacgcttcacagcctggtgggagaagagcagagatggggtgagggactgggaccttgagggctgccccaactaacccccacttccacccccaccagagagcctgggtggaccttacataccaatgaggtgatatgtccatggggcacatcatctgggtcctcttccctggagagggagaaaggagaggctgcaaaggagctcagtgtaggcacagccacctccagcccccctgccatttgtagagtggacatgcactacagccccctaagaccccagctgggggagagccgggagcctcttggatcagagcagccgatcctgccaccctctgctgcctgaaaaccccaagcctgccgggtgtggggcacacgcctatagttccagctacttggcaggccggggcaagaggactgcttgagcccaggagttcgagaccagcctggacaacacttttttttgtctctacaaaaaaaaaatcaaaaaattagctggatgtggtggcgcatgcctgtggtcccagctacttgggaggcagacatgagaggatcacttgagcctgggaggttgaggctgcagtgagccatgatcatgccactgcactccagcctgggcaacagagcgagaccctgtctcaaaaaataaaaaaagaaatgagctgtcaacccacgcaaagacaaggcagaagcttaaatgtgtattactaagtgaaaaaaagccagcctgaaaaagctgtatatagtatgattccaactctgtgacatcctggaaaaggcaaaaccatgcaaacagtaaaaaatcagtggttgccacgggttaaggagagggagggatgaatgcgtggaacacagtgaaactatcctgcgataatatgaaggtggacacatgtcatttggtcaaaaccatggggcttacaacacaaagagaagtgcagtaatgtaaactatgggtttagttaataataatatatcggccaggcgcagtggctcacgcctgtaatcctagcactttgggagacagaggtgggtggaaacacctgaggtcaggaattcgagaccagcctggccaacgtagtgaaaccccattgctactgaaatatacaaaaattagccaggtgtggtggcatgtgcctgtaatcccagctactaaggaggctgaggcaggagaatcgcttgaacccagggggtggaggttgcagtgagccaagatcacgcgactgcactccagcctgggcgacagggcaagactccgtctcaaataataatagtaataataataatagtaacatatcacattcatttatcacttgtcacaagtggaccacacaaatccaacatgctactaacagaggaagctggcagggaggggatgctgaggggtgctataagaactccatgtcctttctgttcaatttttctataaactttcaactgtactgaaaagaagaagcctattcattttttttaaagcccacagaggcatccaccagacacgtgtagcttctgtcttcctccttggtgactcacattttggccaggacataccccacaatcttcccattctcgtcctcagcaatgtaagagagctggtgacaggaaaacagagtgagaaaacttcttgtcggagctagaagagccctttagagggacacaaactggacgagtggcgagttgtgtgatggctcatgacctccgggctgagtggcttggtctccccctcgccacactgtgccctgcccatacccagaaagaagacgcaaagtggggatcctgcccctattctctgctcccttcgggcgccttcttttcctttgcccctgtctgccagctgaaaacacccaggacgccaccgaccatacagccccctgggctctgacagacttgtccactccctccaagatggccagatgggattttcctcggcctgctttcccccatgcccaaattcagaagctgcccacctggggccaggaaaggccatggtagaagtagtatttcatctggtagttctcgggcaggcagaggaggttgcagtgctgcatgttcattaggtcctctggctgcagggaaggagggcagtggaacgcgctcagtctaaggcggcggtgaccacgggtgagaagcctgctccccgtcggtctgctcggccccgctccctcggggctgggcaggcactgtgacgatctgactttgcacaacgcccggagcacaggaacaggagtgggcgccccggaggtccccggagcccacccaacggaggcccgacatcacgcaaacaggagggaatcgcagccccggccccgcgccccggcctcttcggcgggctgggccagccccataggtccagcggccgcaggcacactcagggccaccgggccgggctcggccggggccctcgggagcatgcgcggcagccacccggcccggcgcccacgcggcgcggacagcctcccgccccgggcgctcaccctcgcattgcggatgttcataacggcggcggggctcgcgggtcccagcggatcgtgaaggcgcagtcagctgccgccgcgctccgaagcgacgccgggacggccggggctgggac

SEQ ID NO: 14 - protein, 946 aa, Homo sapiens
MAAHGKLRRERGLQAEYETQVKEMRWQLSEQLRCLELQGELRRELLQELAEFMRRRAEVELEYSRGLEKLAERFSSRGGRLGSSREHQSFRKEPSLLSPLHCWAVLLQHTRQQSRESAALSEVLAGPLAQRLSHIAEDVGRLVKKSRDLEQQLQDELLEVVSELQTAKKTYQAYHMESVNAEAKLREAERQEEKRAGRSVPTTTAGATEAGPLRKSSLKKGGRLVEKRQAKFMEHKLKCTKARNEYLLSLASVNAAVSNYYLHDVLDLMDCCDTGFHLALGQVLRSYTAAESRTQASQVQGLGSLEEAVEALDPPGDKAKVLEVHATVFCPPLRFDYHPHDGDEVAEICVEMELRDEILPRAQNIQSRLDRQTIETEEVNKTLKATLQALLEVVASDDGDVLDSFQTSPSTESLKSTSSDPGSRQAGRRRGQQQETETFYLTKLQEYLSGRSILAKLQAKHEKLQEALQRGDKEEQEVSWTQYTQRKFQKSRQPRPSSQYNQRLFGGDMEKFIQSSGQPVPLVVESCIRFINLNGLQHEGIFRVSGAQLRVSEIRDAFERGEDPLVEGCTAHDLDSVAGVLKLYFRSLEPPLFPPDLFGELLASSELEATAERVEHVSRLLWRLPAPVLVVLRYLFTFLNHLAQYSDENMMDPYNLAVCFGPTLLPVPAGQDPVALQGRVNQLVQTLIVQPDRVFPPLTSLPGPVYEKCMAPPSASCLGDAQLESLGADNEPELEAEMPAQEDDLEGVVEAVACFAYTGRTAQELSFRRGDVLRLHERASSDWWRGEHNGMRGLIPHKYITLPAGTEKQVVGAGLQTAGESGSSPEGLLASELVHRPEPCTSPEAMGPSGHRRRCLVPASPEQHVEVDKAVAQNMDSVFKELLGKTSVRQGLGPASTTSPSPGPRSPKAPPSSRLGRNKGFSRGPGAPASPSASHPQGLDTTPKPH

SEQ ID NO: 15 - DNA, 26115 bp, Homo sapiens
caaaggagaatggaagcaaaactttattcctcttggctggagaagagaactagtgggtggttgtgtacaggacccccatccctcacccctcccagaaccaaagaagacaagcagcgccaccaaatggctccctctgcccaagtgaaagccgagaggtcagcggctggctggggaggcaggtgagcgcagcacggcacagggcaggggcggctgcagtgacaggcgggcggccagggcggcctgggccggggttgaggggaagagggcggggctgcttgggtagcggggcaggcttgggggctgccggctggcacgggccccagactcagggcaccacaacgcggtaggggctgcctgggatgtgctcgtccccccatttgaccaccagtgtgtactcccccttgtccttgagcaggtaggacacgctgtagagccggctgcccacgtgcttcaccaggatctcctcgcagggggtccttgggccatgaacccccaccagcagcatgttgttgcctgaggcaagaggggtcctcagtcccaggtcccagcccccttcctcccgctggtgtcctgctctcctctcctgtccctaagccagttctggggtgacagttctctcttcctaaagagctgccagcacctccccaacccaggccagcttagcagattccagctcctccctggtctttgtttgaggggtccaggaggtggcagggaggtggctctagaagtgaaagccacgccccaaaggcggtccctgctctcccagacactggccatcctgtgatttctggcctcattttggtgggaaggtgggccgggggcccgggttgcccacctgctttgctgcagtctactgtgaagctgctcttctggcctacgtaggccttgctcagccccaggcccttggccaccaccttgctggcgtcagcaggcccaggacccggggccccatgctggggggcacaggtggccttggtcagagagtctacaaacactgatgatgtctcgtggaggctgtggttgctgacgagacgggggcctgcaaggcagagtgggtggggctaagaggtggctgtggtgccgggcgttgggcagatgccaatagcttggccccaggctcacctgtgactttggccttgaaggggctgcccccaatgtggtaggggccgccgtacttgatggagatgaggtagctgccaggtgccatgggggtataggtgacgcggtagccctcagggcactcctggcaatccatcttcaccttggaggggccgtcaatggtcaccgacagggcaccagctcccgcattgctcgtgttcacgacgaactcagctgggttccctgggagcacaggaggtcaggcagagccagactggcctgcctccctgtcctcggccacccagcacaggcttgtcacctccaggtgcctcctgttgtcaccaagagcttggaggcaagggcctagcagctgtgtgcacacgtgcagccgcaccgacagacttacctgtgacaccgccttccagacctgctccgtaagcagacaccaagcctgggtcccctccatgcccaggctccccaactcggatcttgaaggggcttccagggatgtgggtgccgttgaacttgacgtcaatcaggtaaacgccattctcccgagggatgaagcgcacagcatacttatctgaggagcagggagtcatgctgtgggcctggggcccctcctcaaaccagcagatggtgtctgtgaggaacagcctcaaccctggccctccccattttgccggtccatcagtgtgagcccagccacgctgggcacctgcaccccgcagcagacctcctgagggccgaaggtttagacactcaagctgcccaccgtcagggtgcattgggacggaaatcttttacaagccaaacccaggccttgctgcctcctaagaaaggttaccgtgaacaccatatcccctgcatgttaacaggctcagagacgggcaggaacttgcttcaggtcatgcagctgggaagggcaggactaggccgtgaaatgaagcccactgggctcctcctacccacaaggctgccccaggcctgtgcacaagtaccatggccgtggctgaagggccgggcagcactgaggctggactttgagtctttccctgtggagatggcatggtactgcagggtagaaggccttcctaatagctgtgggtggcgagccacatccccagcggcttgggtcaccaattgggaaagggttgcctggcttagggggcccaggagttggggccccgtcttggctgcttacagaagcggtaccttccttttgtactctcagcctgcttccagccagcagggcagggcggccgggcagggacagggcctcaccttggtcaatttctgtgacatagcactcctccagggctcctgaggggctgtgcaccttggcatcgatcgcccccttggccccgttcaggctgactgcaaaagaggctggctggttgacctttagccctgactcctggaagcacagcagacatggttagatgggggtgcttgagccagggcaagggaggacggaaaggccccaggagcaagaggcccgcgggtcgcacttacccatctggcgtccaacttggtttaaagagggagagccactgatttgcaaggggcagcaagccacaggcgcacatccccgcccctgcccccacactctgccgtcgcacacacccaggtggcaggaagggagggctgccccaccctgtgggcagcacccagccttggcaggctgtccctctttaaaccgcagccctggtgctcaaggggcacaggcttctgttcaaagcctttagacctgagacacgagaaaaactccacgtggtgggcaggatatttcctgccgaccccaagcgtgggctgcacccggccagagcagaggcctggaacccagagctgggccaggggggtcactgaacacagggccaaggcctggtctctgcggtggctctggtctgtccgggcccaggagccccaggtgggcggtttctctcggtgcctcacctgaaggctagaaacagtgaggcggcgggcgtcgccagacggagaagccacaggcaccacgaaggggctgtcgggaatgtgttcctcgttgaacttgactgagacttcgtagtcacctgggcagggaaagagtgtaagaccggctcatcagcctttgggcctcccacctcccacgaacagcctgggtggccctgtgacctcaaagtgaagagtgagtgccaggcagggctatctgtgccagccctgggtccaatacccacactcaggccccacctcctccaaccccagccgggttcccagtacctggctcctggaccacataagccacaccacaggagccgtccttgcggtcctcaaaagagatctcagccttgctggggccctcgacagcaatggccaggcctccagcaccagcttcccgggtccagatactgaattcggctgtgggagaacagtttgtcctcactgaaggctgcttcaccagcctcggccccctccaggcatagccaaggtagacatgcctgccggctctttcctccacccccaaccccaccctggccaacgcaggagagcgagcactcggggtgtgagcaggcctacctggcactccagcttcagctctctccaggccagggcccccagctcggaccttgtgggctcccccttcccctaggggccccacggtgaactggaaggggctcccaggcacgtgctggcccttgtacttcacgctgactgtgtgtgtgcccatctcagcgggaacaaagcggatgcagtaggtgtggttctccccttccacgatctcggcctcatgggtcttgcccgatgggctggtcacctgggctgtcatatcctggatgctaatttctgcagggtggggatgggctagtgagcagcagccctgggctccacccctcctcttggggctgcttgagccccaggacccctccccaggcttcccacagcccctaccagggattttcaggctgaggtcacaatgactaccaacgttggccactgaaggagcccgacgcctgcgggtgatgctctctttcacccggccctcgcctgtcaccttcacagagaaggggctgcctgcaggaagaaagcacggcccacgcccctccagtcacatactgcctgtgggccctggtgtagtgaggggggctgccgaggcactgctgcactcaccaggcacgtgctggtcggcaaacttgatgttgatgatgtagttgcctggctctgtggggcagtaggtgaccctgcacgtcccgtcctccaggtcctctgtgttgatgtccaccttgctggggccctcaatggacaggctgagcccaccatagcctaggggatggatacccctgagcctcggtgctatgcacagtgctcccgccccagctggtgggcagccactgcctacctgcatcgcgggtatcaatgataaactctgcaggctcaaaggtgtggccttcgtgaaggccctgaccagagacccgaacacgactggcatccccaatttccgactggctgatcaccaccgggatggggctgctggccacgtgctggccatttttcttcacatgcaccaggtgctcccccgtctccttgggcacgaatgaaatccctggacacagggcatggctgtcagtcagggagggcatggctccccacaggctgcctcctttctgaaccccctggacccttcagccgcttacccacgtggccattacgcagccgcttcagcaaacagggctcctcccggcccgagggcgggaccacagtggccgtcagcaggctgagatccgtctctgagatgttgatggggatgtcggcagcagagccgacctttaggtgggacatacgcatggagtcgtcacctggtggggacaggccagccatcagtgtgcgtccagccatgggagaccatgcccaccctgccacccgtttctgtcactgctcccagtgccacccacctgtgacccgagcagtgaaggggctgcctgggacgtgctgttcattgtacttgactagaatgctgtagtcccccggcagcacaggcaggtaggacacgctgcatgtcccatcctggttgtcagtgcagctgatttctgctttggacgggccctcaatggccagagacaggccccctggagagagccgtgggtgagcatgggaactatgctggggacactccagttggcctgcactgaggagctccgatggccagggcagcagggcagggagccccattcaggagtatctcctgagtccagcccttaccccggtgagggcatcccgggcacagagcaggtcaagaccagagctattgctcaccctctcctgcatccttggtgttgacggtgaaggtggcaggcttgttcactactccatgggtgaggccaggcccataggcagtgacatggccacagttgacgtaatccacatagaactgcaaggggcttcctgaggcaggaagaagggccttgtggaatggcagcctcgtgtgtcccccagccccatctctctgtgaggtggtggcggtggagtgggcagaggcagggcaggcccacctgggatgtgcatgttgtcatagcggatgtccatctcgtgcaggccagcctcgctgggtgcataccgcacggtcacggtgccgtctttgttgtcagtgatggtgggctgcgccaccttgcctgagggcatccgaacctcccctgtggggcagtggggctgaggtcagggcagctcattggcacagtctggcctccttggctcccgagctccttcccaagtccccactcacctgtgatctcgcccttcttgatggtgaaggggatgacaaggtcaaagggcctcaggctggtcacatccagcccattgacacccaccaggggcctctccggggcctgcagtggagacacagggcatgggtgagggacagtgggaggatctggggtccctcctcacacatggtaaactaggggctcacagaacacccagctggctagccccagtgtccctagctggccaggccgtacccaagtctgctggccgccctgggcgtaggtgtactgtggggccagctgctgagaccgtagagggggctgcaccgagggctggtccccagccagagcctgcagggcaaagcagagagctgctggagagtctgttgtcacagaggggccccaggggaacaggccgggacctgccagacacccctgctgacctaccccccacccctcctcaccgtcacttggaaggggctgttgggcacgtgctcgccaccaaagcgcacacagatgacgtatttgcccggctggggggccgtgtagaagatgtcgaaagtgccgtcctcattctccaccacgtccacatccacctctgagccatcaggcgtgcacacggtgcacgtcactttgcctttgcctgccgccttagtgtccacagtgatcaccgtctcctccccaatctgaatggtggggccgatgccagcacctggtggggcagggtgggtccccaaaggggggccagcgtgtgagctcgggttcaggttgttcccgtccgcctgccgcccacacaggcctctcattgccaccaccaagcacagccaggccgccaggcctcctgccccgccctgcccctccaagctgggatggcgagtggtttctcagaaggcaggaaggtttctcctgaccacctcaagtgcccatgtgggagaggcccgacagtagcacccaggtgcctgggaggaaaaggaagggcccactccagcctaagtgttgacagccactcccttgcctactcagcctcgtccagcaccatggcccacactgctgaacgccagcatctggctgggcacacggctgcctgcgcccttctggcctggccccggcccccattgctgtgtgtggacgcggtgaggcggagtcctgctgcagcgtggggggatgtgacacttgcctccccaccccccaggcctgatggtgaaaccggagtttcctgacaactgagaaggctcgcggtgaaaagcagcccggtgcagacaggagtgggagcggggaagcgggaggcagcggggttagcacccgagtagcgcagcgcagcaggcttggcagagcggggatagcacccagggagacagggaacaggaggcccaagctacagccaccactgctgggttgcgagggcagagcagctgagcaggctccagggccccagagtgcccgaggaaaggggagagacagtgacgttatgatctgggtctccgccgtggaggcttggggggctgtgggctgtgaggcctggcagtgagagtgccccctgcagcctggcctcctgccagggaagcagccaggagcacgaaacctacttgaaggccaagctcgaggggccctgccaccaagtcccactatcggccgagggctcctgctgcactaggctccatgctggcctgccgcggccaggcagctctcccaggctccagacctggctgccggctgcccacgctgccctgggaggcttcactcatgtgcaccccatgccatctagttagtggcttgggccccaacctcacaggtacccgactgcccccactttccctgcccggctcccagccaaccgcaggtctcagccactccatcctcaaagtatgcctcctaatttggctctcactgaagccccgtggccgtcaagcttgccagagagcaacttcagcgcccccttccccaccccgggctccctgtctccattctgcaaacagtagccagggaaactgaggttactgagtcttgctcccaccctcaaagcccccaaggccctgcaatcagtactccccagcctcccccgccctgcgcacacacgcctgtcacacacacatcggatcctacggcctgctctataaagccatctcgctcctgccgcaaaactctagccaccctctcaccctttccttagccacctcgcccaagtgccaggcctgtagcctctcatcagcatccctgggtgtccctggctggggcaggtgaccctccatgcctgttggggaatgtctgaataacgtcactgctgggggataggggaagggggaaggagggagacgggccacagaatgcactttggggctctgaggctgggccgggccccgccatgctggccgcccaagcagtcgacactggcgctactgcactaccagccagccccacccgctcatgcacctcccccggcccgggacgcagaggcccctggaaggtggggatgggggtctgtggatctggccagggctggggctcccattgagttggggagaccccttgttccctcagcccacgcaggagcccttgtgcctccctgggtgccaagatcccgagaccccaaagtccccagtggggtgcctctcaggatgcacctcaccccaaagctctcagctgcaacccgagttctcagatggggaaataaaggcccagagaggggaagagctggagcggtcatgctcagctccggaagcctccctgggccctcgccctccagcccacggcctcatcttctgcaccccacccaactctgtccctgcctagagctgcagctggaactgtcctgggaatcggccccaagaggaaaggaagctgcccctctgggcaggaggggcattgggagtggccccagcaagcagcttacctagcccgtgacctccgattgacactgaggtgagagggcagagagcaaggagaaaggtcaggtgagtcactcaagggggcggcccccactcccacacgccgccccaagcagcgagcccttgcacacaggcacaacccaagccccgtgccgagcgccgcagcggccaacagcgggcgggctcacctgtgacagtgcacttgctggcgtccccggtgggcacggcacgcacgcggtacggggagaaggggatctcgtcaccaccgtacttgatgaggatggtgtagcgacctgtcacgtctggcacgtaggccactgtatacgtgccgtcatggttgtcttggatgtgtgtcttcttcggcttgccttcgggatcctgtgtggcagaggcaggggaggcagttggcccaagcccgagtagccccgggcctgcctcaggcgctcccagagtgcccagcgctgctgctacagggacagtctctgggcctcaggcatcttaactgctatggcccaaaagggctgcctgcacctggcagagtccagaatggagactaaaacatcccacacttcccacatgacaacaggcgcggccagccagcttggcacccatcctcagccccagggcctggccagcactaggaggagctcaccggggtgatctcaagcttctatcctatacctgccccatgagaatattacaggtggggaaactgaggcacagaaggctttggtgacgtgctcaaagttagcagcaagtgcacgtctggggaagcctgtgcctgtcaccaccatcctaaggtagtcacaaccttagcaaaccaaagacaggggccctgtccttccctgccctccttggtgcagctccgcagggagatcagacaccagccacccgcagcccacactccagccgcccaggcccccctgcctcccctgcctgtgcccggagctcaccgtgatctggacagccagcaggccctccccggcgtcctttgcatcgatggtgaactccacgggcaggctggcaggcacgccagtggtgttgagcccggggccactggccttcaccttgctggcatcatgagtaggcagcaccttgaccttgaaggggctgtgagggattggtgttgtgagcagtcagacaggttctcagcatccagcctgggccactccccacaggcagcaggccctgcctcttacctccggggtacctcttcatctccatacagtactgagatgctgtagggcccttctcggctgggcacataattgacggtctgggtgccatcagcgttgtctaccacgtccactggctccaccaggcctggccccagccccagggacagagcatcagctagtctcctgggcctccattcctaccccaccacactggacggccaggacccagccccaggcctagacctcgctttatcctcatccacccgaccctgggaatggccttgaccccctctggcacgaaagacacccatctgggtgccagctgggacccttgcctgcctgccttcctgccacatctgctcagtgaccagtcccatctgctctacctcctccaagtcccccacctggctgcactgtcacctgaggctcttccaaaaacacctacacacttgcaccacctctgcactctggtcctcactttgggcctccagtttcctttcccggccctcaaacaggacactgccctcctgacccctggctccaggcatgcaaacactcacctttgggcccttgcactttgacctgcaatggggccacaccagccttgcttgtgtccacctggaaggactgagggaggttggcacgaaccatgcctgggctcaggccgggcccagagcacttgaccttggacgcatctgtcacatcatgcacagggaccttgaaaggactgcctgagggttggggcaaagggatggcggctgtatgagacagggtggggacgagcagacagtcccagccctgccctggccgccacctcctcacctggcacttgatggccaccataggtgacgttgaggctgtaggtgccagcctcataagggatgtactcgaccgagcagctgccgtccttgttatccatgcaggacatcttggcctcggaggggccctctacagccaggcccaggccgcccgtgccagctcccctggtccaaacagacagccggtcattcctggggttcccaggcccaccagccacacgggctcctgggggctcccttacctggtctccacagtgaacttgttgggcttgttggtggtgccactttggatgcctggcccgtggacacgcacccgggaggggtcgcagccctcggtcacgggcacctggaaggggctgctgggcacgggactgccgtcataggtcacgtccacggagtgcagtcctggaggagtgcaggccaggtcaggaggagcccgggccaccccacccaccccgtctgccagcctgtgggagtccccagcacgcaccctcctcgtaaggcgtgtactccactttgtacatgccatcgccacggtcctgaacgtaggtctccgtcaggttgcctgaggggttggccacacgggccttgacgtgcggccctccggtctgtgtcagagcccgggcgtccacactgaactcagtggtggcctcacggaagacacctgcaaaggcacagagaggaggcttggggctcgggggttctggtccctgtcccccgtcacataccccacggcagggcaactcaccctggccctcaataccaggcccatagcactggacaccggaagtgtccaccgcaggttccacctgcagcttgctggggaagttgggcacgggctggccgccgtacttgatggtgacggtgtaggccccggggcagaggggaatgtaggtaatggtgtgcgtgccatcaccgtggtcctggatgtacacctcggccggaagccccgcctccgagcagatctcaatggtcagctccgcgctgcccgcgctcgagcagtccacttggaattggcccacctccccagcggtggcccgctccagcccggggcctgagcacttgactttggatgcgtcaaagcagggaaccacgtgggccttgaatggggagccagggatgtgggtgtcagcgaagaggatgttgatgttgtagtccccgggctcggtgggcacgtaggacacggaacatgtgccatccccattgtccaagcactcgagctgcgcctcacaggggccctccaccgtcaggcccaggccacctgtgccggcgcccttggtgtcgatggtgaagcgggcgggggagcccgcactgcctccctgcagccccggcccaaacgccttcacctgagggaagaaggggtcaggagccaaggccacactatgccccgatcccagacctcctgcttgactttccacctgcctccccttgccctggcttcctgccctcaccaaacagggacacgggcgggcccaggctgcctgccagatgggccatccatcagtcataaggacaaaaaggagggcagggcgcggtcactcacgcctgtaatctcagccctttgggaggccaaggtgggtggatcacctgaggtcaggagtttgagaacagcctggccaacatggtgaaatctcgtctctactaaaattaccaaaattagctgggcatggtggcgggcacctgtaatcccagctacttgggaggctgaggcaggagtattgcttgaagccaggaggcggagggtgccgtgagccaatatcgcgccactgcactccagcctgggcgacagagtgagactctttctcaaaaaaaaaaaaaaaaaaaaaaaaaaaaaaaaagaaagaaaaaaaaaaaaaagaaattcttcaaccctgatgactttttgtgggtttctatttccctcctcccctttactctcacttaaacagggtcaaggttgacagtctgtctcaggaaaaaaaaaaaaaaaaaaggatttagggcaggtctggagaagatggggtacctttggggccctcagagagcacagtgggttctacccttagggcctcccataccccaattaccttgctaggcttggtgggggccacagcttccagaggaaaggggctgccaggcacgggcacgccgtcataggtcacctccacctcatagggcccttcctcacggggcaggaagcgcaccacactgttgtcagcccccaggcctggctccaccttgcagggcaccgctgcacccgaggggcccacaatcttggatgccactttgccttgaccaccagcaccctttgatttgactgtgaactcctggtctttgccaacgtccacctctgtggaaacgatgaaaggaaggagagagacatgacacccagctcagccaatccctggatgtgacaaaggcctttgcgacaagggccccaactacttactctctcccaggccagacaccttgatcttgctgaggtccaggcttggagatactgccactgagaaagggctcttagggatgggatcccctccataagtgacattgacgcctactggaccctgggaagggtgcagaagggaagggggtatttagagacaccagaattgctccccaaccccctcctggacctccatgcctgtcctctcccaggtaaggaatgagagtgggcagaaagtccctcggagctgtcccctaggctgctgcatgaggaggctggggactcggtgactgtagtggagggtgtggctacctgctggacaggcgtgtacttgactgtgtaggtgttgtcatggtggtcgatgatgtccacatctcgcactgcatcccccttggtgagtcctgagaactggacgtccagcttgcctttgccagcagctttggcatttactgtgaagtgggtgggcttgccaagctcgacacctgaggaacacacagggaccatgtaggggcaccctgccccaagccctcctacccttgatgccccgcaacctgccatggggtacctgtcctcaccagtgcgactgaggccagggccctcggccttcaccttactggcgtcatgagagggctccaccttgactcggatggggctggtgggcgtggcctgcaggcagtgggaggagaaggccttagaggagggcagacgtcatccgcaatgacatcttagcggccaggagcgcagcacccacctggtcagcaaagaggaccataatggtgtagctgccagccccccggggcgtgtacttgaccgtgaaggtgtcattgtcattgcggatgatgtcgaagtcgatgtcagcttcggcggggcctaccactccaggggcacacttgatgccgatgctgacgtcccctgcggcggggagaggagcggaggctgagacctcgcagggacaccccagccacctgccctcccacccacagccaggccttaccctggccagcctcggcgcagtccacagtgaagtaggtgggctcgtgggccttgagccctgtcttggctactccggggccgtatactttgaccttgttggggtggctgccagctcccacattcacctgcagggcacaggggcaagggcaagggcatgagcagcctggaggagactcagaagctccctcagctacactggcaggcacacaaaatggtccagctgccttgggaagagtctggcagttcctcagttgaccacagagggactgtgtgatgctccggttcactccgaggcaactacccaagagaaatgaaagcaaatgtccacgcaaacacctggactcactgttaacagcactgttcatgatcaccaaaggcaagctcatcctcaatatctgttagcaagtgaacggaaaaatggaatgtggtctggccacacaatggagtattatgcggccataaaaataaatgaagcggccggacgtggtggctcatgcctgtaatcccagcactttggaaggccaaggtgggcggaccacctggggtcaggcggttgagaccagtctgaccaacatggagaaaccccgtctctactaaaaatacaaaattagctgggaatggtggcgtatgcctgcaatcccagctactcaggaggctgaggcaggagagaattgcttgaatctggcaggcagaggttgcagtgagctgagatcacgtcattgcactccagcctggcaataagagcaaaactccggctcaaaaaaaaaaaaccaggatgggcgcggtggctcatgcctgtcatcccagcactttgggaggccgaggtgggcagatcacaaggtcaggagatcgacaccatcctggctaacacagtgaaaccttgtctctactaaaaatacaaaaaattagccgggggggtggcgggcgcctgtagtcccagctacccgggaggctgaggcaagacaatggtgtgaacctgggagaaagagcctgcagtgagccgagatcgcgccattgcactccagcctgggcgacagtgtgagactccatctcaaataaataaataaataaacaaaataattataaaggaacaaagtgccaagacatgccaaacatgaacgaaaacacggaaaacttcgtggtgagcgaaagaagccagacacaaaaggccacatggcacacagttccatctatagaacatgtccaggataggcaaagccacagcagaaagcaggttagtggtcaccaggagctgtgggacaggggagtcaggatggtgtgccacaaccacttgaaatggacgaatcgtgtgctacgtgaatgctatcgagatggactaaaggccggtggaggttggctcaccctgaaggggctgttggggatgctgacgcctccccaggacaccatggctgtgtgcttcaccggcttcctgggcacgtaggagcagctgtaagtgccattgccgttgtccttgaccaacgcctccacagggcagccttcattgtcctgtcaggcagataggagcaggtggcctgctggtcagtgcccaggcctgggtgcccacacctgccctgcccccaacacccgtgggtgctctacctggacttggacccgaagtggggccttgccaccgtgcttggcatccactgtgaactctgctggcttgttgacggccacacctgtcttctccaatccaggcccacgtgccttcacctagcgggagaccacccagctgtcagggggccaggtccaggctgccagagctacaacccaggcagggtggccagggacacagagtgccatccccaccagaccccaagcaggagcagcagggcgagacttaggccatcacagcctgctctttaccctgtctgggtggaagtcctggggcgcgtcacggatgtcagccatgaaggggctgaggcggatgtcttcgctgttgcacagcacgtgaacggcatactcgccagcctcctgcggccagtagcgcacatcacaggagccgtcgcccttgtcgtcacattcgatcttagcctgcgatggcccttccaccgagaagcctgacaacagccaccagtcccctcagtgccctggagcctcagggtgggccgtccttgccatcgtctgtccccaggtgcccatgctgcagcctccaacttacccagcgtgcccacgtcgtccccgatagcctccaccacaaagtctgctgacttgccaacgacgccgccctccagcccagggccccaggcccgtaccttctgattgccacactcggtgcccaccttcacttcgaagggactgcaaatgcgagagccacacagggaacaccgaggatcaccacatgagccagcgtgggccccactgtggcggccaggcaggaagagcccatgtggcccctcatcatcaggtggggaggcagaaggaagagaagaggcagagtgtgcagagctgggagagggatgcctgggggcctcacctgcgcccgatgttctgaccaccccacgtgatggtgacgatataggttccagggaccatggggtaatactcgaagccatacacgccatcccccaggtccttctgcttcacgcgctcctctccctctgccaagacaaggagggcctcaggcctgcccagcagtgaacccgggggctgccgccacccatcctggcctggctccaggccaacttactggggcccttcacggtgaccttcagctccccactgccagcgccctttgtgtacaccttgaagtcagctgtctccttcacccgcacacccttgggctggaggccccggccaaccgcccggcaggcactcgggttacaggctgcaggcagaggggccagctgagcaccagcagctcggctgggcgacccctcccttgcctcccacagggccgggctgtcaggattggtgggtccctcagagcttggctggagggggacatgcaagacagaactggaagggactgtgaccccaggaactgtggcctgggccaggacatggcaggcctcctcccacctgctccacaccagcccagagccccccagcctcccccttccaagaagaagacagatccaagtaccgttgaccctgtgggcagagcagagagcagcaggtttctagacagctggagcgagctcttccgaaggtgaaagcgtgaggagagagatggagaggggcgaggagaggagaggaggaagggccccagcaggggaggaaaaacagcatgtgcccagacagtagaagctcaaagagtaggggccccggggcgggctgcagcgggactggcccagggggtccccctcctgtgggaggcccagactgcagtgccacagcagagggcagtcagggccgggcctaccttggccaacagtgacagtgtaggggctgcgagggatgggcacgccggcaaacgtgacgtgcacggtgtggacgccctccatggtgggctggtagctgcagcggtatgtgctgtcgccccgggcctccagctgaggctctaccgtgcccttctgtcccatggggtcctggatcacaacctcgacctcgcccgtgccagctcctgccacgaggcacctgctcagctcccaggccccagtgcggctctccccacagaccagctgggccttggcagcctcccctcacctgccgtaaagatctcaaagtaggtggtcttgttggcgatgttgccactgggctccaggccgggaccttgggctgtcactttgctggcgtcaccctgtgacttatccacgtacacctcgaaggggctcttggcgatgtgctggccagcaaagagcacagtaacctgtccccagaagggtgggccgtgagggtagggctgggggcctccagccactgcctgaggtcacaagcctcccccctggccaagggctcaccttatgagtccccgtcacctcggggacgtaccagacggagaaggtgcggttcttgtcgttattggcggtcacttttgcctgcagtgggaaggagcctgtgagcctttgctaagagcagccccactgaaagggagcgctgcggggcctctgctgccagcagctggccctacctcctcctggtgtccggccgggtcctccacgtacaccagcacctctccctggccagcacttctggtctccacagtgaactctgcccgcttcttcaccatgttgcctgtgggctcgatgcctggcaggggaaggcgagccaaccacgggccagctgttaaggccacagcctcacccctccacccttcagccctccctgctggcccctaagtcaggcacattccaaactgggcaagttcattcagtgtgagctgtggcacagagcctggcctcgggacccagctgtgctctcgctgctgggacaggcccagcctgttttctggaacattcattctcaccgcactgggcccttgttcctgtgtgagccttgactgggttttaggtccctgttactgagacctggttcatctccatttataataaagaccgctggatgctacctccccgaggaccccacgcagcaggcttctgtgactggaggaacctattagcattctcttgtcgttttcactagtcccaaaaacccactcttgtctgactcttgggtggcttgatcacctagccgccatgtaacccaagacccctggggaccgccacgtttagatgggacactgtcttatggggaagacgttggcacacgggtgcacccctggtggggctccctcacctggcccgtaggcacgggctttcttcgggttcagtttgggccgcaagggagcccctggcttcagcttggccttggggaactgggacaggtaggtcatgacagagtgctcgtccacgttggggtccacaatctcctcgggggtgatcacctgtcacaggcagaaaacaggagccatcgggcctccgagtctctcccaactgccgatccggtcccctacagctgtagccaggccgggcgggtgtacctgggggatgcccagccagtcatccgcctgctgcatggcctctcgcgcattggtaacgggcttgctggcgtcccaagagtcccagtcaggacacaggcctgtggcgcaagggaggctgtgagtctgggggccgcagaaccccctcaagggccacccatgggtgaccccagcccagtctctcctgcctctgcgccccctcacccggggcacagctgtccaccagggcgcccagggcccggccgctctgccagtcccggctgaagttggtgatgggcagctgcggcagcttgttctggatccagcccaggagcctctgcttgggggtctgcttcttggcctcctcatcctcctcctcgtcccacatgggcatggagatggagtagtgcaggatcagggtccagatgaggcccaggatcagcttcaggttcccgtccacgatggccttgctgtctgtgagtagaagagtggccacgctgggcacacggctgtgcgggaggggccgatcccaggctttggggtcagggtctggcagcacggggtagcaggggccaaggaggaggtagacaccccctcttggccagtggtaggatgtggatgaggccctctctgcccagggtcccagggggtgttcagaggtgaaggagactttggggtgagggcagatacacacagacacacacacacgatgccagcagggtatgattactgccagaagccctgggcccagaggaagggcagagggcagacccagcctgcagatgggcagctctggagaacagctggacagtgtccacagctgccagagcaggggtccgccacacacctcaggggcctatggggaaccaggaggaggaggctgactccagctggcccagaatccagggcccatgacctggagtggggctggggctgaggaagaggaaggtgggtggccctgggtggttgggaaatacaactgttgttccagggtgggtggggtgaggcaggggaagtgggggagttgggcaaacgccctttgggtgagggattgtgacccccgccaccacccccacttcctctaccacctcgaagactcaagcttggagttgggaggccacaggcctagccaggggaggggcccagagcccaaaggaaccagcagttgggccacatggccctgactcactggggcccatcgggagatgccggggtggcagcaggagacactgggaacccccttgccacccactgcctgacccacttgccacctaacgggcctctgggcctcggcaggctcgccacaggggaagtggttagggcgggtccctgacaccccccatcaccatggcaaccctgctgggctctgggccccacccaaggctacttctgggtctcaggctcaaggcaggatggctcatctttagaagccctgtcagcctcccccataatcagacaaaatacttctctggtgagtcaactagggggcgggcctatgaggaggggctgggctgtccatggcagctgcttcccagcccagcaggcagcacctggagggccaggtgagccgctcagagtggcctccccagttcccaggttggtcctggccccacgaggctgcctttcactctccccaaatggcagcagggagggggactcggagaggaccaagggtgcagggccagggaacaaggccagccagggcttcccatcaggcccccaccccagtccagcctcagacccctcaacgacccccacacggggagcaaccaggcccaccaggtccatgttaggccagcctactccgtccccatccccctcccaaaagagagagggaaggaccagggcccagggctgggagactgtctggctggatggccccgccccatcccacccccctttccccagcccctgggccagccaacccctccctcccctaatcactgctgctttccaacatttttttgccttatatggcaaagctctgggaactaggcctgctccagccagctcacaaggaggaggggagctgggaggagggaggagaccccccctaaagagctggggtgtggcccgcctccccacatccggtcgccccccctaccatccaggactgagatgactcagcttggctagactgaggctgggacttgtgggggtgggcctgcccctcgcctcaactggcattccaaagaaagaactttggttcttgggatctgccctctgagtggctgggggaacccaagtcttggtccctcactttcttgggttcagcaagggccattccagggctgcagggtaactggaaggcctctcaattctgaagaagagaagactcatcatccctctcctctccctgttccacatcacccccgagtcacccattctggggcctgccctctcatgcagcccctatcttgagaacgaattgggctgctgcagcaggcctggtcaatgccagcctctccagtccagtgacacagacactgggctggcacaatgcacgctggagcatctaccaaccaactcctgcgtgctacacgcagaaaagcaaggcctacatggaagcaagagtttggcccaagatgaagagaaaagttggcgtccaagtagtctacaagccaggtctctcagtcaaccacgcccaactcaccccgggtgcagttttgctaactatgcttctttctggcccccaggttgcctgtgtgtgtgtgggggggtagatctaaactggtggttggagccatctccgatgggcgacccatcctccagggacacaaagagcccagagccccagacaatgggacgcacgagctccaacccacacttcagaaccaacgggcctctgaaggccagagggccctctctaaacagctgtggggggagagcccgggcctcctcctcctcggggacggggcgcagggccaggagcctgcccagtgcccgaccccccaggcccactcccaccgcgagcacagccgcggaggcgcggcctgcggaggatgtgagttcagcctgggcgccggccagccggggcgcagcgggcgggggcgcgtagcggttcgcacgcccggccggccagccagccagcccgcgcgcctttgttctgcaggcccgcgtggagcagagcagccggaggcctcgggagttgcgctgcggcccggaagggggtggtttggaggggtccgcccggggagatggaaggacgcacggagtccccgcccccgcccgcccggcgcttcggggcgtccctcaccgatggacaccagtttgatgctctcgcggtccaggaactcgagcgccaccgacacgttctcaagctgcatttggcggaaagtgggccgctggttgtgcttgcggtgcatcttcttctggctgagcacctccaacagcgcgataagccgcagcccgtcgctcaggtccgtctgcaggttggcgatgcgcttgctcacgcacttcaggtgctcgttgcaccagcgcgtgaaagtgttctgctggatcttcttccacggcgcgtcctccgccaggtccttctcggtggccggcatctcggcgtcccgcgtgtcgacgccgccgcccggagccgcgcctgctgcgctctggcccgcccgagagtgggagctactcattttgaggcgcgagaagccgggggggcggtgctgcagcctcggcgaggggacggccctttaattaaagtcgcaggcacctaggcgcgcgggaggcgaggcagggagcagaggttgcgctgcggagagagcgagccctttaaatgcgggaggagggcggggccagagggcgggcctcctgcggggaggggccgtggggtggggcttcgagggcgcgcctgccccaccccgccccgcccgttggaatgcccccactaggcccccgggttcggctgatcagacgcgaaacccgggctccagggtgggtcgctgggcagtggggtgggcaaggatgctcccagccccgcagcctcgcgttggcgctgcaggaaacgcgccctagagcgaggaaaggctgagcagtgtctggcgcgggactgcttggcctgcagccggcgcgccttacaagggactttccttccccagggcccctgcggggggtggggtggctctcttccctaagtcacttgggctctgccccgtccctgcacatccctaccccccgccgtcatcccccttccccgggcccccagggcctagggttccccggcggcatccccgtccgccggcccggcagcggcgggaaggggccaaccctaagagcgaacccctggagagcggcagccccggaccaggcactgccgagggcgctttgtgtgctcatcacctgggaagcggctgcagggcaaggcctgcgcctacgcggtccccgcagaccccctgccacgggcccgccttcccagtccgtagggccctcgcccgcgcacctgtgcccgctgcttcccaccgcctccctctctgcttccctccacccgggaggatatggggcactgggccaggaggccgccggcactccaggagcaagcagccttcgaaggggtccgggcatgcccacgggcacgccagtgggcgcgggcagagggcgccgtgcgatgcatgcagagacgtgtgcccgcctaacccttcatgccagttcacccggggcactggggggagctgaagcggggggtcctctcctgtcggaaagtcccctcagcccagcgtggccagggcagggggcaaacacgggagtggcattccagacccagaggggcctgctcagaggttcccataagacttgtcaggctctgagcacctgggtctgggtgggcttcaggtgtggtggcaggtgcagaggaggcctgaggacagggatcaggggcctggggggttgtgtccccagagctgtgggggctcttcactcaaaattttctggtagataactctggagatggtgcagtggctgctgtgccgagatgtagactgggaccaggggacggctggggacgctcactgctactatcttcagtcagaagccagcctgcctatggcttcctccccattgtgcactcccctccctctcagtcctcggtacctcccctctccagaatgtttcctcctctgagtgttttttttttttttctaggaaggcaggtatctgtccctcctgttcaattctagtaataattaatttatctgctaaagaccagtgagagatggaggccctgggttggccagcacgtcatgcccaaatatggttgactctcctgtagccctgggtgtctacatgacacgtggtggggctgtgatccgcccagcacattcacttcggggcagcctgtggccccactggtttttcccactagtagtggtgttagggggtgcaaatggcattttccagtactgaggccaacccctgtatattgtcccctctcctgaccactttgagacacacctgcaccaagtgcgcctgggcgtctgggagctggggtggaggtgggagggagggctgggaagggggaacccatacagacccctccctgcacgggccccattcaagacgggcttgaagttgtccttctggtccccctgccccactggaaagcaagttcccaggcacggaattccatcaataattgactctctctccactaagggccattgagctgggttgtctgggttcattccttaatcttcagagctcagggaaactgagtcagagtgaccagtggtcaattccagcagaaagagtgtcaggaggtgggtgccgtgtcttccagccctagcttttccctatttagaggaaacaaggaatgggcgtgtagagggttcttgtccctagaacatagtatcaaccgccagatgtcgcccgatcccaaagccaccagatcgggcagtcctgggaagccaaaatccagctctttcatattttcccttatttggagtagattcttggatgttaggcacaccccgcccaccacaccacccctggccctcagaccccaggccagaccctcccactgggaggtatagcccaagcccaggagctgttcagctgggatccctaaggagctgtttccaggcctgcgtagccagggggcgcaggagggaaggaagccgcagactggcaaggtgagaagagacctgtgctggcaagtccaggtgcggcaggtgaggtcgcccattcccaagctcccaccttgacggtgcactcggagcacttacaaatgggtctgccagtggattttaacctattttgcctggccccaggtggcacgggaatctggggacattgttggttatatcctggctggcagtgcgcatccaactcagagccaacctggcatagggcccagggcccaaccaaggaacctggcctggtctcatcctcaccatggcccccatggagtagagcagccccagaaccagctcccctgtgcccaaagcagctggtgccctgtggactcgagccagcaagggacacgctgtccccctcccagtgggcacactggctgagaagtgtccttccaggtggccactcgccctgagtccacacaagttcctggtgtcagggcccttctctctcaggcatgcagtggtccgttcatgggcaagtgcccagacaccctctctctctcggggaccccccatggcctcaggctcccacattcgtgggcacagacatggctcgtgggtcaactagggaagctattctctggacactcactcccagatgccaggggagcctccatcggctcacgcatcccagctgaacctggcccggacctgggcgcgagctggcgcctgcgttttccggcctctctgcccgccttctccaaccccgcccccggccgacgaggagcgcggcgaccctacggcgcgaagccgggccgcggagacctcacctgctgttcctgagagcgaccggtgaccgatgaccgcggggtggcgcccggatcgccttcgcgcccgcgcccgcgccaggcgcctcggggattctgtcggcgtccgctgcgcgcgacgcgcctccacgcgaat

SEQ ID NO: 16 - protein, 2647 aa, Homo sapiens
MSSSHSRAGQSAAGAAPGGGVDTRDAEMPATEKDLAEDAPWKKIQQNTFTRWCNEHLKCVSKRIANLQTDLSDGLRLIALLEVLSQKKMHRKHNQRPTFRQMQLENVSVALEFLDRESIKLVSIDSKAIVDGNLKLILGLIWTLILHYSISMPMWDEEEDEEAKKQTPKQRLLGWIQNKLPQLPITNFSRDWQSGRALGALVDSCAPGLCPDWDSWDASKPVTNAREAMQQADDWLGIPQVITPEEIVDPNVDEHSVMTYLSQFPKAKLKPGAPLRPKLNPKKARAYGPGIEPTGNMVKKRAEFTVETRSAGQGEVLVYVEDPAGHQEEAKVTANNDKNRTFSVWYVPEVTGTHKVTVLFAGQHIAKSPFEVYVDKSQGDASKVTAQGPGLEPSGNIANKTTYFEIFTAGAGTGEVEVVIQDPMGQKGTVEPQLEARGDSTYRCSYQPTMEGVHTVHVTFAGVPIPRSPYTVTVGQACNPSACRAVGRGLQPKGVRVKETADFKVYTKGAGSGELKVTVKGPKGEERVKQKDLGDGVYGFEYYPMVPGTYIVTITWGGQNIGRSPFEVKVGTECGNQKVRAWGPGLEGGVVGKSADFVVEAIGDDVGTLGFSVEGPSQAKIECDDKGDGSCDVRYWPQEAGEYAVHVLCNSEDIRLSPFMADIRDAPQDFHPDRVKARGPGLEKTGVAVNKPAEFTVDAKHGGKAPLRVQVQDNEGCPVEALVKDNGNGTYSCSYVPRKPVKHTAMVSWGGVSIPNSPFRVNVGAGSHPNKVKVYGPGVAKTGLKAHEPTYFTVDCAEAGQGDVSIGIKCAPGVVGPAEADIDFDIIRNDNDTFTVKYTPRGAGSYTIMVLFADQATPTSPIRVKVEPSHDASKVKAEGPGLSRTGVELGKPTHFTVNAKAAGKGKLDVQFSGLTKGDAVRDVDIIDHHDNTYTVKYTPVQQGPVGVNVTYGGDPIPKSPFSVAVSPSLDLSKIKVSGLGEKVDVGKDQEFTVKSKGAGGQGKVASKIVGPSGAAVPCKVEPGLGADNSVVRFLPREEGPYEVEVTYDGVPVPGSPFPLEAVAPTKPSKVKAFGPGLQGGSAGSPARFTIDTKGAGTGGLGLTVEGPCEAQLECLDNGDGTCSVSYVPTEPGDYNINILFADTHIPGSPFKAHVVPCFDASKVKCSGPGLERATAGEVGQFQVDCSSAGSAELTIEICSEAGLPAEVYIQDHGDGTHTITYIPLCPGAYTVTIKYGGQPVPNFPSKLQVEPAVDTSGVQCYGPGIEGQGVFREATTEFSVDARALTQTGGPHVKARVANPSGNLTETYVQDRGDGMYKVEYTPYEEGLHSVDVTYDGSPVPSSPFQVPVTEGCDPSRVRVHGPGIQSGTTNKPNKFTVETRGAGTGGLGLAVEGPSEAKMSCMDNKDGSCSVEYIPYEAGTYSLNVTYGGHQVPGSPFKVPVHDVTDASKVKCSGPGLSPGMVRANLPQSFQVDTSKAGVAPLQVKVQGPKGLVEPVDVVDNADGTQTVNYVPSREGPYSISVLYGDEEVPRSPFKVKVLPTHDASKVKASGPGLNTTGVPASLPVEFTIDAKDAGEGLLAVQITDPEGKPKKTHIQDNHDGTYTVAYVPDVTGRYTILIKYGGDEIPFSPYRVRAVPTGDASKCTVTVSIGGHGLGAGIGPTIQIGEETVITVDTKAAGKGKVTCTVCTPDGSEVDVDVVENEDGTFDIFYTAPQPGKYVICVRFGGEHVPNSPFQVTALAGDQPSVQPPLRSQQLAPQYTYAQGGQQTWAPERPLVGVNGLDVTSLRPFDLVIPFTIKKGEITGEVRMPSGKVAQPTITDNKDGTVTVRYAPSEAGLHEMDIRYDNMHIPGSPLQFYVDYVNCGHVTAYGPGLTHGVVNKPATFTVNTKDAGEGGLSLAIEGPSKAEISCTDNQDGTCSVSYLPVLPGDYSILVKYNEQHVPGSPFTARVTGDDSMRMSHLKVGSAADIPINISETDLSLLTATVVPPSGREEPCLLKRLRNGHVGISFVPKETGEHLVHVKKNGQHVASSPIPVVISQSEIGDASRVRVSGQGLHEGHTFEPAEFIIDTRDAGYGGLSLSIEGPSKVDINTEDLEDGTCRVTYCPTEPGNYIINIKFADQHVPGSPFSVKVTGEGRVKESITRRRRAPSVANVGSHCDLSLKIPEISIQDMTAQVTSPSGKTHEAEIVEGENHTYCIRFVPAEMGTHTVSVKYKGQHVPGSPFQFTVGPLGEGGAHKVRAGGPGLERAEAGVPAEFSIWTREAGAGGLAIAVEGPSKAEISFEDRKDGSCGVAYVVQEPGDYEVSVKFNEEHIPDSPFVVPVASPSGDARRLTVSSLQESGLKVNQPASFAVSLNGAKGAIDAKVHSPSGALEECYVTEIDQDKYAVRFIPRENGVYLIDVKFNGTHIPGSPFKIRVGEPGHGGDPGLVSAYGAGLEGGVTGNPAEFVVNTSNAGAGALSVTIDGPSKVKMDCQECPEGYRVTYTPMAPGSYLISIKYGGPYHIGGSPFKAKVTGPRLVSNHSLHETSSVFVDSLTKATCAPQHGAPGPGPADASKVVAKGLGLSKAYVGQKSSFTVDCSKAGNNMLLVGVHGPRTPCEEILVKHVGSRLYSVSYLLKDKGEYTLVVKWGDEHIPGSPYRVVVP

SEQ ID NO: 17 - DNA, 5106 bp, Homo sapiens
aagggcccagagctctggccggcggaccttttccttctggagtttccccggcgggtgtgagttgttgcggggtctgggggagctgggaggcccggtttgggaagttttgcaggcaggtgcatgagccatctttctctgaaagtgtttaagaaatgttcaagaacagcggccagagtcaagaaactgggggatgaagggttatctcgagactagacggaaggaaacgtatcaggggaggggtggaggccagaaggaaggagttaggtaggggccctctcccaagctggcgtttttgctgggtggaatccttttgctagatcccttggatttccgttttccgtgtgttatcacactgttggaactgggaagaagagaaaaagaggcaagattttggcatttagtaagttaagtctgaataccgagttttcatccgggtgcatacgtacttaaaataccaaatgggtccaggaagggggacaaagtacgctttaatttatgagaagatcagctactagaaactgtatatctgtttttctcgagttttcttcttgcagtgctctttcaatctcattggacatattttatattattttcctgcttaagcactgggggttgggtggaaggatctgtggctcatcataggcaatttccacacttttaaggtttctgactcttcacataaacacctctcactatgatgaggtcctgtatcaagtacaattaatctttgtactttacaatttacatagtgatttttatttacattatcatatttaaacttaatcaaagtccttggcacggcccatggaacaagctccatttttttgataaagaaactgaggctagaaaagtttctatgtgtgcagagaaggaaggtgaaattattttaatgcttcaaagttatataatgcttcctgcctccctgtatttttctttccattgatcttccttcaaaaccctgataggtctatcccagttttgcaagtaagaaaacatgggctgtgatgtagagctaatacgttttggggtagtgggtcctcagacttaggtctgtctccaagggtcactgactttgttttgttttgtttgttttttgtcaacagattagtccttgtggcaccaagtcagaatttcattcaaaagacaattaggaagatggttttctatggaaaatatttaagtgtaggtcttaatgtgaaagaaagagggagagaaagaaacccctttattatgttctcccttccttaggcattttttgtcccgtgggaaaaaactgtactagggacagagacctctgttaagttttagagaaaagggatcttttttttttttatttgagacagagtcttgctctgtcgcccaggctggagtgcagtggcacgatctcggctcactgcaactccgcctcctgggttcaagcaattctcctgcttcatcctcccgagtagctgggattacaggcgctggccaccacgcccggctaatttttgtatttttagtagagaccgggtttcaccatgttggccaggctagtctggaacccctgactttgtgatccgcccgcctcggcctcccaaagtgctgggattacaggcgtgagccaccgtttcaggccgagaaaagggatttaaaatgagaagcttgaatcttattgaacataattgtaggactgccagagaggactggtggatgaggaatatggcaagggacatgagatgggaaaaattaaataggctgtggtttggaagtctcaaagtgaaattcaaggtgcaaggctcttaaaagttaaatccagcgattcggtacatagcttaggccctattaaatgacccagtgctttaagaactatcttttgaaaggaacacttcacacaagcaccctcaaaaataattagacacctccccatttctctgttaaatggtgaaagacacccaagactagacctaactactgtcaccctctcctggcctcttggcagccaaaaggccacatggcccaggctctccagcatcactgtgtagccgacttggacaaaaatggacttctccccattgccacttgcagatctcttcaaagaatcagcagatctgatagtgtgcccctcttcatccccggcaaccactgttaaaggaaagattgggaaagatcccaccccgccaggagggaggcaaaagcctctgacgctcccctccccccatagctgaccaaggccagggccactgcgggagcaccgcgcgtccacgtgcacccagcatgcccggtcaccctttattacgtaagagtcccaggatggagttgtacctgctgccggcccctcttccccgacggctaataataaacccgggttcctgtttcccggccgcggccactccagattcggggctgaggggctcactctgcaaccaaggcacgtgcattctggtcatcccacgcggggagcgcgcgcaaggcccgcccagcccccacatgccagccccaccctccagtcggtccggacgccgacgcctttttgaccctcgctgtgcccggccctcctcatctggcctgcccagggcttggtgctggcggggtccagctgctccaatccctcctcctctgctctgccctgccctgccctggcctgccccggcgccctccctcagcccgggtatcaggcgagaggcggagctggcccggcgcgccccgcccccgctgtagaaagggccgggcgagtgttactcgcggtcatcccggcctgggccttttatctcggtgctgccgggggaggcgggaggaggagacaccaggggtggccctgagcgccggcgacacctttcctggactataaattgagcacctgggatgggtagggggccaacgcagtcaccgccgtccgcagtcacagtccagccactgaccgcagcagcgcccttgcgtagcagccgcttgcagcgagaacactgaattgccaacgagcaggagagtctcaaggcgcaagaggaggtgggtgcccacgccccatcgctgccccggccagcttggttgcttgagctcaggcttttcggagggagaagttgtggtggtggggggacacccttctccccgcggccgtaggtgggcgaggaggtgggactgcccagccgcggggagccacccaggcgccgtcccggacgagctgtagccagagaagggggtgcgcgcgggcaagggcgccaggccccctagcagggtgaataatctaatctgttctttcgtctccgtgtatcaaacaggccagggctcgacccacagagcaccctcagccatcgcgagtttccgggcgccaaagccaggagaagccgcccatcccgcagggccggtctgccagcgagacgagagttggcgagggcggaggagtgccgggaatcccgccacaccggctatagccaggcccccagcgcgggccttggagagcgcgtgaaggcgggcatccccttgacccggccgaccatccccgtgcccctgcgtccctgcgctccaacgtccgcgcggccaccatgatgcaaatctgcgacacctacaaccagaagcactcgctctttaacgccatgaatcgcttcattggcgccgtgaacaacatggaccagacggtgatggtgcccagcttgctgcgcgacgtgcccctggctgaccccgggttagacaacgatgttggcgtggaggtaggcggcagtggcggctgcctggaggagcgcacgcccccagtccccgactcgggaagcgccaatggcagctttttcgcgccctctcgggacatgtacagccactacgtgcttctcaagtccatccgcaacgacatcgagtggggggtcctgcaccagccgcctccaccggctgggagcgaggagggcagtgcctggaagtccaaggacatcctggtggacctgggccacttggagggtgcggacgccggcgaagaagacctggaacagcagttccactaccacctgcgcgggctgcacactgtgctctcgaaactcacgcgcaaagccaacatcctcactaacagatacaagcaggagatcggcttcggcaattggggccactgaggcgtggcgcccgtggctgcccagcaccttcttcgacccatctcaccctctctcattcctcaaagctttttttttttttcctggctggggggcgggaagggcagactgcaaactggggggctgcgtacgtgcaggaggcgcggtggggctgcgtggaggagggggccacgtgtgagagagaagaaaatggtggccggagatgggagggcccaaggaacctcctgggagggggcctgcattctatgttggtgggaatgggactgggctgacgccctgcattcagcctgtgcctttcctggggtttcttttctgttcttttcggaggagagggcccgagaaggggccataccagggcgcggcgctgggttgccacacttgggaaagcagcccggagctgggtgctggggaaggcggggcgcgtagcctcccgccgccctgcggttgggccggtggaggcccaggcgttgctaggattgcatcagttttcctgtttgcactatttctttttgtaacattggccctgtgtgaagtatttcgaatctcctccttgctctgaaacttcagcgattccattgtgataagcgcacaaacagcactgtctgtcggtaatcggtactactttattaatgattttctgttacactgtatagtagtcctatggcacccccaccccatccctttcgtgccactcccgtccccacccccaccccagtgtgtataagctggcatttcgccagcttgtacgtagcttgccactcagtgaaaataataacattattatgagaaagtggacttaaccgaaatggaaccaactgacattctatcgtgttgtacatagaatgatgaagggttccactgttgttgtatgtcttaaatttatttaaaactttttttaatccagatgtagactatattctaaaaaataaaaaagcaaatgtgtcaactaaattggacaagcgtctggtcctcattaatctgccaatgaatggtttcgtcattaaataaaaatcaatttaattgatttactagcaaaagtaaa

SEQ ID NO: 18 - protein, 183 aa, Homo sapiens
MMQICDTYNQKHSLFNAMNRFIGAVNNMDQTVMVPSLLRDVPLADPGLDNDVGVEVGGSGGCLEERTPPVPDSGSANGSFFAPSRDMYSHYVLLKSIRNDIEWGVLHQPPPPAGSEEGSAWKSKDILVDLGHLEGADAGEEDLEQQFHYHLRGLHTVLSKLTRKANILTNRYKQEIGFGNWGH

SEQ ID NO: 19 - DNA, 438424 bp, Homo sapiens
  misc_feature (325326)..(375325): n is a, c, g, or t
cacttctatataggctttcttttattgtgttttaaaaattccctggagaatattttgagtgttgcaaaagaattgtattttgaatagggaaaggcaaatagtggatgagagacagtaaaagaaaatgaattatatgtcataaagtagtatgaataaatggtagatgttgaataaatatttgtcaacatcataactgcaaaaacacaaaatgatgaaaaggcaacagagacaggcagagacagagggtcttggtgccacaaaaatgattttattttgaaccagaaaggaacagcaatcaagacaatagtcagggccgagggcttggcagtgtgacttaagtaccggggattgaatttgtccaggtgcaaggagtgacataaagagaatcaatttttcatgtccaagccaagctgatacagatgatgatacttatcagtgattcccatttacacaggcttggattgcttttcagatatcagatttttggaactattttataaatatttttaaaggtgatggagccactggagtgtaggtgaattggtgcccctccccttttctttttgggtgtatcaagcatataatcaatgacaggaaaagtgaaaggtttttatgagagttttgcattaaaagaaaaccaacgatcaagtttctacactgcagcactgttgatatttgagcaagacaactcttcgtggtcgggggctgcgcttgcactgtaggatgtttaacggcgtccatgacctctacgcactagatgctggtagcttcccttccccggctgcgacaaccaaaagttgccattgcattgccaaatgtctcctggggggcaaaatcgagcactggttgagaagcgctgttttcaaaaacatcctcctgcccccatcattgtcttggtgtgctttttaccattttattaagatagaccagatggtcaacttcccaacaccaaatgcacatgtatgccagcatatatgcgtgtctctttgcaggtatctgcatgttcctggagctgagatggaattccacggtcactggaggacgttagttcagttcctcagcaagtttaaggtcaatatatcagtaccgtaataaaaaagcctgtctgtattcaagctgtttcttttcctccagcagaaaccatcgtcaatatttgcagtcagtttttgaagtcactttcttttaaagctggaaagaatcttcacccaggcccaccctcatcttaatccactatttagagtcctacttgaatgatatcgccagcaactttcaactttggatccagatttctttatttgtatccaccaggaagagaggtaccacgtttctgagttcttttatgagcactcgctatgtaatttgcaaggcccagtgcgaagtgaaaacgcaggccccttgttcaaaaattgttaagaatttcaagacatcaacagcagagcattaaatcaggcttagggcccttctgaactcctgggctctgggcatacccatgacaccagacctggcagtcttggttggtgctgcattgattttgttgtattaatttaattggcactgccatctcttttgcccctgtatcgcagtgtttcctgtggtgaggaccccaaataataaaatactgtgacctcaatcagtttaaagagaatgcaaaattacactgcagcaaatttttacagcatacattttttagactttcaaaaaaaaaattcacacgggaatcttttctacatcattatagtaattaaacacggtggcctttcaccatatacatattttcctgtaaatatgacaacctggaactagtaactgctactatccacaatgcttttaagttagccaagagtgagacttccacaacaaaattatgacataatctctcatgtccttataaaaatagccaaacataccctaaatggcttactgtgaaaatttgagtagtaacttcttaatattgaaaaacattattttcatggaaatattgtccttctactaagtgttttatgttaacatcataaggcaaactgtagcatttattggtacctggagaccgtgattttaaaaactcagaagctgagttttagacccttttatttagaacctgttagtgtacaaagtgcattaaaatatccattatccagttacccaaaatgtatgtaaaaattactgagacaaccctttcagtttactcagagaaggcaaacacacattgcttttatattgtaataaaaagaaaaacctataaggtttccagagaaagattgttttttttccattgaggcgtccatcttttagatgtgaaattgtcttaggtatctatcaaaatattcatctgggtataaataatatagtaaatatatagaatctatctgttaagaaaaaggagagtgtctgctagggaagaggatggaaggacccaggaagctggcttggcctcccttgaaatccagatttgcaatcacatgacctttggccacgtgatgctgaaacaatgagttcattgacttatttcagggaggcagttggttgatttggttaaaaacaaaataactaaaaacaatgtctaaatccactagtctgctcagtcaaaatggctgacccagtatcccaggtaaatattttagcaattgaaaccatttatagaggtcatgcccttcatcaaactagaaccaatgccagagttctgggccaagaactgctcaagaaagccttaattcatggaccattccaacgcatcagattggcatgcaaagaatcccagctgacattttataagcaggttcctgaataacgagtttgaattttttttttttttttttggtcttacaactctattgtaaactatactagactatagagggacttctacatctttcaagatgtgtttaataaaggtctgtttataataacttttgaggcatgaatctagcaaatagtactttatacaatgtcccttgtcattaccaactcataaatattaagtgtttttcagtgacttatgtttggatgtggtagtgctgatcagggccatgtgctgatgtcctggagagcaaaatcaatccaaagtggtgctgctatttgtgacagaacatgtttatttactcagccccggagacaaaaggaaaattgatatgggggagcgggaaataggagaactattaaatgtagtgaagaaatttcacaggtctaaaggaactattaaaaggaaggataaagtagattctatactataaaacagaatcctacctctgataaaagacaaatcagcctgaatttttgaataatcaataggattcaaaatgactattttcaattgcaatctcattcttaatgttcttccagaacccttaaccctgagagaagcagggcaaaatgtggccaaaggattcagaacctttctttccaacattatcccatcagctatgagaaggtaaagatttagccacggcaaggtccgaggtccaaaatcaactcttttcattctctgtcttgctctccattttagttgatctgatacaactttttgacatcacaattaaaacacttcaaattaaaccagagtaagaaagcctgtttcctcccctactaggttcaaacacatcctgttatgcaccatcgaggtgagaagacctaccatgggatcatcatgggatatcaggtaagaagatgagtaacatacaaaactacaaaagtttttgtttttttgtaagcccacagattgtgatgaaatgaaggttgtaaatagctgataaacttatgggcctcttaatgtgcaaaaccaagtaattcctaaaagttgtaatcctgattatgtttctcttataaataatctatagattttcctctaaatacaaaaaaattaaagaaattattaaagcccgtacttaatacaagacacagtaaaaggagaggaatctcttgttttgagccctatctgagccgatttcgggacacttctggtgagatttcattacactcatgaagcctgtgctttctcagtcccctaaatagtggcctgaaccttactgttccccagaaagcagctccatgtggccagacgctcacggcagctgctctgtgcagtccaaatggtctgggatagggagcccagtgataatcgtcagacacttgttccacacggtgaaggtggggcaaacaggctgcgcaaatgcgacgtcgaaggtgtagaggtggatggagttcaaagcatcataaaaggcgatagagccgttatcatagtccagcaggatgcccacgcgccggaggtggggggcaggctcaatggggatttccttgctattgtgtctcaccacccagttattgttgcagcggcagagcgcccaggaagcagagttcttcccaatccattcatgcttcggggctgatttgtaagcaagaccaatggcatacctgcggaaacaaaacagcaacaacaaaaacaatgagccatgttgcacatgcacgttaaatccgttctgtggtcctcaggggttataaaaacatgatcatttgttgtccctgttcattttctttaagtgaaagcttggcaagaaccccaacatctgtgttcctcatctccttccctcccaaacatggaaagtgggtggaaagtagtgggtggaaagaagcgtcgtatttacccacatttctgttttcagctcaaacactacggagaatttgaactttgagttttgctgctttttttcactcttataaaaatctacacaatgaattcgctagaccagtgctgaccaaaagaactttcttcaatgactgaaatgttctgctctcctcgatatggtaaccacaagccacatatggctactgggcactttagctgcggctggtgagactgaggaactgaactttaaatttatttaattttcattaagttaaatgatttaaatagctgcctgtggctcatagctaccatactggacagcacaaccctagacttctccttttgaccttcttataatttttcatttaacaccatgtctgtcattttctgattctgaatgcactttgccaagggcaagcacagaagatgattcccatttgcagggataaatcctttgtcattactcagccccaattttctcatgtatattgagaaatatacagtgttattttaaggagtaaaggagagaatacatgttaagtcccaggcacaggacctggcatgtaatattcagtaactgctatttattttattattattgcctgatggcacatattaacaataagtaccagaatcagaatttgaactcaggatgactcaaaacccacaaacacgaactacattctacaatgccatccgtaaccagaaattgtgcagttcatcactgccaagagcctttctgattatactggaaaaaaaattctgaacgtgtttgagcagacggatcttctggttattctaaatgttctcttgctgctcaaaaaaatccaaagaatgctttctacaatgttctaagcatcttaatctctttttacccctctgagtcatgcctctgtaatattcatcgtatttcagttattaagataaacaaaacccatcactctttataaagagtaaatgactcacagttgaacttttaatatgttatagcagaaaccagtctaattggatattaacatatggtaccttacccaatgcagagagaaaaatttcatgggtctttaataaaatgacattctttaaaaaaaatcacactggacttaaaatacaatcactttaagagtggtgtgtttgtttaaaaagaaaattaacacaacatgccatcactaaatccaaaagaaggatggaattgataatctgccaagcccagtgtgcaggcctgtctgtcatcaatgttgcatcctctcttccctcccgtccatcctctcctgcttatgaggagaatccaagttgcatttcccagaatcccctttcctgtaggagtctgggtcaggctctgctattgtgatgcctttgcacaagatccagaagtgcttagaggaggggaaacacgctttcctgatggcagacagtagacgtgcggttggtggaagcttctagatgagcgcctgagtacacctgccttgtgctgtgggcaactttgcagcagctacagctcatcatgactccatgaactagagcagcagactccctgacttcatgccccagcccttccagggtcctgtaagcttctggctcccttctgtggcatgcatcgagggtctcaaatgtcatctgtttatttgatacactgatatggtttggctgtgtccccacccaaatctcatcttgaattcccacatgttgtgggagggacccggtggaaggaaattgaatcatgggggcaggtcctttcagtgttgttctcgtgatagtgaataagtctcatgagatctgatggttttaaaacgggggagtttccctgcacaagctctctttttgcctgctgccatccatgtaagacgggacttgttcctccttgccttctgccatgattgtgggctttcccagccacatagaactgtaagtaagtaagtccattataaacctcttttgcaaattgcctggtcttggttatgtctttaccagcagcatgaaaacagactaatacatacattttggaaaggttttcattttgcaattgtcagtatctcccaccccccaaaaatgttctgtataccccagtgaatactatttccgcttttcagacaatttggaacctgcatcacaaaatcaccacatctgtattgtttccttcttgttgtggcacagcatttttattttttattactttgatgtttatttcccatttgaaccttaactgaaccctatgaaatagctgtggcaggtatggctgactacatgtagcaagtagaaacagaagattaaaattgggagcaaaatccagagttgtatgctgcccccaccccttctggtctaataatctttgcatgaacccgttattactcatttagttaacaccatttcataaaacaccaagtgcacattagcattagagagtaagaaaatactaagtgtatagtccattaagcaaaggaaaataccattatagtatcattaatctgtgaaactaggtacatatttccattgagcttgaaatgtgcaggcagaatgtaatgttccattaagttacgcagtgagacacggagaattcaaagtataaaaattatgtctctcggagcaatgttaacgtgccccattgcacagatcataatgtacacatcaatttaaagtcaggactatatttcataagcaaatatgtcattagctgttgcaagtcaagatgtcacaggcatttaatcgtagggggtgccccttccttgctaataccccccaaggaaatgtaaagtgactttctacatgaagatttttctgaaattgacaccgtcaggtttgtaaagattaattgtgtagcaattaattttagaatttcttttccccctcatgagttagttttgacatctggagggtgttttcaaggtaatgctgatgtgtgtttatataactgaagtggtctgatggaattttgcaaactattcatcaatggcaatgagatcataatgatcaggtttcatttatcataattaattattaatagagtaataatcatttagaccctggattctatcccagattaatacagcacattaattaactagaaacatttgctttttttgtacctgcatccattgtgttttcctttgtgctttaattttgccccactgcagctaaaaattgcaaatgccaatctagcccagagcctagtggggtgaaggatttgtcctccatcctctggcaggatgttggaacagaaaactcttctaggcaaagagaattatgaggatagcaacaaaggaaaacctactcgctcagccaatatagtatgtaccattattgggagagatgggaagcttacaattcacttcttagatttttggctaatttctacctacaatataaaggactcagccatgtcacattatttgcataggtttgaattgaaaggtttttttatatataaataagtgttttatcatgcttatattgaaagaaacactgttatactcaccatcttcaggctatgcaattttgaatgttgattttattttttaaagcaaggattcagctatcactcattacgtacactgtcataaaccctagagagtaattatagcatttcaaaaatataccacccttttgtgaatagcagcataccatggtggttaagagcggggaacagcaaactactacccaggggccaactctggccctctgcctgtttttataaatgaagttttattggaacgcagccatgtccatttgtgtaggtgttgtctgtggctgctttcccactacaacagaagagtcgagtattagtgacaaaaatcatttggcatgcaaaaccagaaatattgaatctctggccctttacagataatgtttgtggactgctggttaagagcctgacccttgactgcagacttactgactctgccacctgtgagctttgtaaccctgtgatcttcagcatatacctcagtcacctcatcagtaaagtggataatattagcacctacctttgtagggctgtaaggctgaataaatgagttgacatctgtaaaatgcttagaccagtgcctggcacatacttgtaccatatgagggcttgttaaataaaaataaaatagctccctttttgatcaatagcaagcaggcatttgtgagacagacggtcaaaggggtgcagttgtggctgtggattaggcaaggttaactttgtgaggttaactaattccaatgtaattgtgtcctgacctttgcccttattcttagagaactcagtgggctaaagtcactgggctggatctaacaggccttttgaaattattcccagcctatgatcactgcttcacccccaccattcaacccttagctatttgcactaattggtccagtctagaaccataaaacatacaaggcaacagaaattagttttgtgtaatgatgaagagtgatgtttaaaagtagggaatggcaaactttttctggaaaggaccagaaagtaagtaaatatttttggcttcgtagaccatatgattctctcttaactactcgattctgctgttgtggctgaaaggcagccatggactatatgtaaaaaaatggacctggctgtattcccataaaactttatttacaaaaccaggtagcaggccaggtttggctcatgggctgtggtttgccaacccatgtttcatggcatgaaagagcagtgttaacatggtatagctcatccaatgatcagagctctataatcttgaacagagaacccacaggtgtgggtattagtaatatatggttgttgtttgaatctgctgagtttgggggtgtttgttatgcagtattatcctagcaagagctgactaatacaacttttctgcattttattctttaagatgcattacagtatgggttgactctctaagtacagaatgagatgtgcctttttataactgcaggacaatagaaataagttgcttaccatgtgcttccacttatgaccacttcccaataatgccggccactatcaataaacacatttccagctactccatagctcccctggctggtgaagcgttcaggtgtgtgactcttcttggatgatgactcatcacgttctactgtcaagttatcatgggacaccttcagttttcgatgagcagatttgggatccagtttaaatggttggcctgaaaacaaattcacaaaacagaaaaaggaagaggaagaggattgtttattttatcataaccaatagcatattttcaaaatcaggtttaaaagacaggaacaagccagccctccctgagtcatgcctcctatcacaaagtggtatcttatattttaatagtaatttaaacattataagcaactttcaaagacatttgcttgcaaagttttcataatattcaaaagacaatagagagcagcaactctgtgtatagtacagtacacagtaagagtgaaaaagaacatgttcctgtcttcataagctttcagtctaccagttctaagatagggatccagtggtggcatgccaactattcaacaacagcatggataaggcttagccagaaaacatagggtgagctagcttcacggattccaggtgtatacaagcagcacaggtacatactggctggatagcatcctgaaaaggaggaatgaatgaagactccattttcaaccactgcagtgttctatccagcataagatgcattcatgctcaatagacttcagaccagaaaccaaacaaatcaagatcttgggtcttaacatatagaatattctagaggtttatattattctgagattattaaaaattaaagcattactcttaggaatttaggatgagaatacaattttcaggccacaaaattaggaaaaaatgtgatagcaatgcctgggttttctactcatgaaattatttatatataataaggccttctctatttcattactcacatttgtgtcttaaagatttaagtattaaaaaaatcttggcagagtcacacctggacattttgtcatagttgttacttcttctttgacaattcaatattggtttggagtactgcctgtcattcaacactgcattgggtacaaggcgtttaaaggcaggaaatgcattgcaacctgatacaaatgccatggtgtccaaactccacagtcactgttgcagttggcaggttccttctgcccagtatacagctctcaatcacaggaaaaggtctagtaaattcaactgtggcaatacacgatgctgggcgagaaactgacccagtgagtataggacagtgtgtgttgtcacatgtgggtaggccaaaggatttccagttgccttttggatacaaacacaacacaacaccagcacctctaaaatcctttctttttaggtcacggaccagcatactttttctgcaaagggcctgacagtaaatatttttggctatgcaggccaggccatgtggtctcttttgtgactattcaactcttctgctatagtgagggggcagccacggacaggacaataggtaaatgaatgggtgtggctatatgctaataaaactttatttacaaaatcaggcagccagatttggcccttgagctatagttagctggcttttgttttagaaatctatttctgtacatatcaaagaaaagcttaggctgggctggtggctcatgcctgtaatgcctgcactttgagaggccaaggcagctcgattgcctgaggtcaggagttcaagaccagcttggccaacatggtaaaaccccatctctactaaaaatacaaaaattagctgggtgtggtggcggacacctgtaattccagctacttgggaggctgagccacgagtatcacttgaacccgggaggcggaggttgcaatgagccaagaccatgccgctgcgctccagcctgggcaacagagtgaggcactgtctcaaaaaaataacaataaaaaagaaaagaaaagctttaaagggggagcagagaaaaccctcaagggctgagcagggattggacattctcagaggccgtaagatctattggattacatgtgtagtttaaattttgacttgtaaaaagaagtccttaggaatgatcatgctagcaactatcagagataaactatgaactaagacaagaagagtatgaagacagttttgcttaaaatatttcaatttttaaaggtggaaggtagaatatggattaaaaatgattgataggatactaatgggcagagcaggaagaaattccttaatggcgcccatcatttacaatgaaggccaagttctgctcggcctccttccggtgagatatatcagaatgtcagagccattggaaagaccggccttgtgatggtgacatactgcctcaaacatcctgcctgccttggctcacaccctcacccacgcatgtgtggagcagaatcatgcaatcttggtgagcaaattctgcccatgcctcagatatgtttcccaaataaaccactacctactctgcccaaattcaaggcttttgcttcagtgaagacaaattagttcaagaaagagattaatagcttactttactaaataattcaattcattataatatttgtatgggacacgactcttattcaggccgttgtttacttacatggacaactctttcaataatcttttgatactgtgcccagcagccagtcttccttccttgtaatccactcaccacatcatagtgcaagagagctttatttcatggaaattttcatcctgcctgtttgatttaaactcttcaatctctccaccaatcattggtatacaaagaaactccctggtgtggcccaggaggctttcgcgatctgttcttgtctccagcctcctggctcacctatcctcccaacctaagacacactttaaccacatggatcaattttctgttccataaatatattctccttgtctctgggcttttgcccatgctgttccttctgcatggaacactgtgtcctcacatcccctgctcctaacctaccttggaaagcctctcaaggttgtgctggggcaccctggctttgtcaacttagaacctctcatggttattccagtcagagatttcacatattgaatgttaattaggattaatgtgctttattccccaatagtctaggacctttttgagagagaagcacaccttagggagttgaagatactcataatatccttagcatcttgcacagcatcccaaacacacttggtgctcaaacatatcttttgaaggaacaaatatttacatgttcaaatgcaaatcaaataatgctgatctaagtgtgcataggtattgtgccatttgttgtatgactgtaaagaaatatatcatcatgttatattctcttatgtacttttagaattactttgagagggtctttttgacaactcataacaaccctcaagttgttaaaatattcccattttaaaactgaaggaacactaaatgcattgtgggatcctggattgggtcccggaataggaaaggaacattagtggaaagctggtaaaatctgaataaagtctggagtttagttatgagtaattcatcaatgttaatttcttagttatgataactgtaccaaggttacataagatgttaatatttgggcaaactgggttaagggtgtacagaactctctgtattatctatggatttcctgtaaatctacagctattccaaaataaaaaatctatttaaaaatatgaagaaactagccatatagctatatgggtaccaagtgggaaagccacagtcttctcattcgtaattcagtgctctctttacatcccttgttcttcctctaggatccaacacattcctctaggatacaacacttgtactgagaaacaaggatataggttaaatgagggttccccttgaaaagcacttaattgttcctgttgactgcctggcaacctcacaacatggcgccataccgacacactccaatttgctttctcttgggaggtcttatgcaaataaacaccatgttacataacataatattcctagatcaaaaggatgtaaagaaagaagagaggataaaacaaaacacatgtggacagagagagggagatgacagtatcatgagacacacatataggccagaccattctctgtgatgcgcactgtcctgtggattggggatgtttcccatcatccctggcctctactcactacatgccggtagcatccacctcagatgtgacaactaaaaacctcttccagatattactaaatgtcctggtagggtggggtggagggggaggaagaagtgtccctgattgagaaccacagactccgactgttttctagaataaaagaatttctgaagagtgattagttggctactctgctatgaaaaataacactatccaccatttacagagcccctactgtgtgtcaggtcttacatatacatcatctacttctcacaagaatgcctccaggaatatttatttaaaaaatgagaagactcaattttttaaaattgagtaatgcagagagagtaatggcctcacggctgtgaaggaatagaatcagttttggaacctagaggtatctgatgcaaattccattattccacactggctttttacttgttttggggggctgtcaatgatacccaagacagagaaaaggaaaagaaagggggacagagtcagctgaaagaagagcagataagacatgacagctctgttgagttcacagcacttactgtttgtcttcaacttcccaggctcactgctgcggctgcccgcctggttgatggccttgaccatgaagatgtacttggtgccgctctgcagaccgtgcaccgtgtagtggttctgcttgatgttgggtactatcatccagctatcagccgaattacacagacctgcaaagccaatcagacatggtgcagttctttggcacaaggggagcaatgtttgcataattttaggttgaataatttccatttatttgaatagagttggtaagtgaagtgctttgtcttggtagtcatgtacgaaaaactgacttcactaacgtagatgtggcagattgcatttttgcctccaaaattctccctgccctgtatatccaggcccaaataactttgcaggtgctccttctaaagaggtgcaatatatttccctgtcatgtggctttgaatttggtcaagtgacttgctttggtcaatagcatgaggctgaaatgacaatgtgctagttgcaagagtaggcatgacaaaaccttgagggtttctgttgaccctttgtgtctgccactgctctggagaaaatatgcctaggatactctgtttatcccaacaggatgagacagggaacagctttaccatgcagccaacgcccagccagtgcaggagtgaaccaagcagcgatcagccaaccccaaccgacctccaacagggaagctaagaaatgatcatcatccctaggatgactggtttcagagtggagtggggctgttgctctggctgcatcctgcaggatgtgggttggggagcagaccgagtatttatgatgcttggaagaatatgtaggaaaaggaagcccatcttgttttgcagctggttgatggctgaaaacatctctttggtatcaggtccaactcccctctctcctttttccacccatcaatctccactccaatagaacctttttccaaacccttggtgaccaggctgtcaagaagtttcctgactctgttgaatttccttcactgatccctgggagagggctgggccccctccacttccagaggactccaaagccaccaccccactcctctttcaattgatttgcaagtcaaagggttagttcctttgatcttgaggcaacttatactttaccagattctcaagaagcagtcccttaatctttttttggtctcacctctttgataatctaataaaacctttctgtagtaagaaattcacaaatgcatatacacaccaaaccacaaatatatgcatagaatttcaaggtagtcacaggctcccgaagcctgtctttgaatcttactgaatacttacttactccatcttttgagttaaaaattattcatggtattgtcacagttgaaaaattcaccttatatgatttccatcttgggtgcataatattttcaagtacacatcagtgaattaaatatatatatatatatatgtatgtatgtatatatcatctaaagatatctaaagatacacacacacacacacacacacacacacatatttggtcttgtgaattttctgttgcctttttttttttttttctctaacctgcaaacattttcgccagtggactgccagatttgaaaaagccagcttgaagcaagaatgtaatttaggactcatagaagggtttgagtgtgtgtgtgtttatatttggagattcagcagagcaataagaggcacaatccatccctcctccccaaatttattttctctaattcttagccctctgttttcctaccaattctcatttgcatatgatgcaggaaaacatccacaaatagtttagtaacatgggaatctccttactatatatcccttctgatcttccttcaccttaccttttccttgaacatagctataataaactccatacttctggataatgccacagccaaatattagattttgatccaatcaaagaagggtcattttgaactctgagttctgggccccaagaggcctataactctctttaggtacttaatattattacagtagtaataaaacaaaaaattagcttttctattatgtaggatagtgtactcatattcctagatctttgtcaatggcagtcagccacgaatgagaacaattaaggcattcagtagattcaaatgagaatcgtatcaatttcactgcctttatactgttcctgtttaattgaatatgttacaaaaaaatgactattgtggtcaaagaaagcaagtgtaaaaatgtttcaataaactttacatcactgtacaacccaaaagctgggtttaatgtggtgggggaacgctttcagtaacatcataaagcagatgtctgaaattgctgaaaactgtaacttggcctaaaatccaaagtcttaacccaacaaagattttatgtttcagaaaccttttccaaacaaaaagggactctgactatcctgattattttgaagaggtccctattttttccttgaaaattaaaagaacaaaatgtttatgaagtagtaaaatttcattggttagctttatactgggacaatctactttcatgaatactaacaaacactattactgtttaggtttacctttatgttattattattgccaagataataattgagaagttgattaaaaatgccaggaaagcaacattgacaattttcttctgggggctggagtaagtggggtgacttggagtgcaccattaccggtgttggtcttacgccagcaccacctaacttcttgcatatggcactgagtttgcttaagcaagacttctctgccttgacaccccactgtgttaggactcttgaccaggctttattcatctctttatgaaacacccacacaaccatcctgattgaaacttcacttttctccaaactcattttcagtcatctttgagggtgttccaacattcacctcctccgactcagtttaaaataacaacggagcttggaaaataatttgtccacaatgaaacctaattaattgagttttttgattttatacattttttttttcattcacaatgggttagaagcatttccctacataatgtggctcattataagatcttaattacatctgggatttcagagccttgtatggcaactgtcatcttgccacaaaaaattatgtgtaaaaatgtcacatgatgtggacagtcttaggagaggctgcacactggtttctaacatcctttgtctcttccaacagactggacagaagtgaacattcctttccttctcctctgtaaaaatagtatatgtttaataattttcatgaatgttttctaagtgactacaataaattaaaaacagataactacttagccattaaggcttgaaaaaaatgcagcttttgatttctgctaagaataagaataggctgctggggaaaggacccaatttaagacttaaaatgaagcatcaaaagtagttttagagaaaacgtggcaaacgttgtaaaattaaataaatatctagttattgataagcaattcattaacatctatagtcataactctattaacaaaaataaaaaataaaaattaatgtcattacttttgcatttgaatgtatgtatttcattagtgagggccttttcgtaagattgaaaaagctccatagatattatctaagtctccttcactaacgccagttgaaggcaattaactacaatttattaggatgagtgaaggaaccatgacctagagacagtaaaagattttctagtgatataaggagctacagccaggttttgagcattatatcttctcattttcagtagagttttaccattagaccttgtcacgcaatacaacatctgcaaaggatacttctccaaataataggacagattatttaacatcattcaaggaaagcctttcacatactgattgtgtaaaaagctatcatgtagataatcctggaaaattgcaaaactggtctttcttttaaaatgcaattatggggtgagtacagtccgtatttttgtaggaataataactttgaatatctatgtgctaccactgtggcaaacacaagactaaggtgtttactattattatctcaaccatgtgaagttaaaacactatcccttcttacagatgaggaaacggattcggaggacattaaataatttgctcaagactgcagagctagtgaggtccaaagtcaagattgaaatccaggtctcctttggtcactacaaatgtgaaaaatatttaagaagaaaataatttgaaaatctttgcctatcggttagctttttatctgaatgaattctttctttgtcgcaaatggatcctgtaggcattaggacttcactattctggtttaatgggcatcaagggaggaacacatcctgatacaaacaacccggtgagagtatcccagtttggtcagcaccagcagtttcactgtttttcttccatcctgggagaatgggcctttctggcatctatgcgttaaaggctgataatcttcactaagccatttgcatttcttttcttatggcaactggtttctgggaacaaaacatctctggaatcacccaacataaagttctgagttcattatactgagtggttttgctcttgttgagtttttttatgcatgacctttttgcatcatctattctattaatgcatcatgtttggtattattttcgatgcaaatagcacagaaatcaagttggtcacagtttagccaagtgagaaaccctaagtttcaagcaataaatatcttcctttcattttggggatgaggtgaagctctggtattgagttagggccttttggccccaattccttgctccttccttgtaattttgcaggtctttgcattctcactctgggctcacccaggggacgtctttgacaaacctcatgttagctaatgtgacacagacaggggcttaaaaagaatgtgtgtaattggtcctgcctttactccttcatctctgcaatcagggtgagagcagacttgagctggattgtaggaggatgagacagatgtgcagcagtcgggttgccacagttatcagtctgccatgtgagggagccaagatcagcagggcttcctagttgacactcagttgactccagatgcataagcaatatgaattctacttaggccctgtggttgttggctattcagcaaaagccaacggatacagagcccatcagtcaaggccaaggctacatgtactcccaaagtgtccatgacgatttgatttaagaaatttcaggagagggctgggtgcagtggctcatgcctgtaatcccaacactttgggaggccaaggtgggtggatcacttgaggccaggagttgagaccagcctggccaacatggcgaaatcccatctctactaaaaatacaaaaattagccaggcgtggtagcacatgtttgtaatcccagctactcaggaggctgaggcaggagaatcatttgaactctgggggtggaggttgtagtgagccgagatcatgacactgcactccagcctgggcagcagagcaagactgtctgaaattttatatatatatatatatatatatatatacacacacacacacacacacacacacacacacacacacacacacacatacatatatgaaagaataaaagaaaaccaaaagaaatttcaggagagacataaccatctgaggaagacatgccctaggatggtccccaggattccaactccctggtattcataactgtgtaatattatctccttagtgtaaacaggacctgtcatctgcttctaaccaacagaatatggcaaaggacaaaggtctatcacttttattactcctgtttttatattacattatatgacaaaggcgaaggcgaagggagtttacagatataattaaggtccctaattatttgatttggagctaatcaaatggcagattattctgggtgagtctgacctagtcaagtgagtcctttaaagacaggtttggaggtgacagatttgaagtagcagactctctcccttgctggccttgacgaagcaagctgccatgaattccacaaccacaatgaaacaaatttgtcaacaaatggagggagctaagaagtagattcttccttagttgagtctccagatgaatgcagcccagccaacaccttaatttcagactgtgacaccctaagaagaagacccagctcaactatgccagaatcctaacccatggaaactgaaataataagtgggtattgttttaaactgctaagtttttggaaatttgtttcacagcaatagaaaactgttagcacttttcctgaatcagacgaaaatgatttgagagaaatatagcatttctcacatgggccaagaaccactcttttggtataaaatgactccaaatgttttctttttccggttagactattcactcatcaacagacgttggttctatcagtcctctatgtattttcagagaaccttccttggtgttttacaatgaatcatctctccattttctacctgctcttctcagaccttcacgtgcttcttttctcttaccttggaatttctgatcatcttttgaatttcatcttcttcaagtttgatacaatccctggttcagtttatcccaaatatgctagtgatattaatcacaaaatattgagaaaacaattccttaagtgaagacaaaatacattaattatattcccccctttttgttgtgtttttccttccatgctacatagtatagtagtgtgtgtggatcagtgtgttatggtctcagtatttagcatgtaatcatgtagatattatacatttaccttgttttaaattagggtttctcaacttcgacattactgacattttgggccagatagttctctgttgttgggggatttcttgtgcattgtgggagatttcccatctttcctcacttctacccactagatgccaatagcaccctcctcctaggttttgagaaccaaaagtctctagagacattgtcaaatgtcccttagggggcaaaactgcccttgttgagaatcactgcttatatgaaggagtgactatttagtatgatattagtgatcatagattaacttgtgtttcaggtttatggtgaagcacaatcaaggtttaaaattttactagactttaattccacgttaagtttatggtatatgtagccaagatcagtgaaatacaataagctcatacagctggaaaaatgcatttaaaaatcatgtcatctctctgaagggcaatttggcaatgtcaagtaaaattaaatgcaaataatcttttcctagaaattgcacctcaagagattatactacagatataattccccgtgtgtggaaggagagatattcaaggatatcttgaacatccttggggatactggggcattgtttgtaagggccaaagattggaaacaagctaaataaacatctatagaagatgggataaataaattagagcatatctttaaaataggatatgatactgcctcaaaaaggaatgaggcagttctttatttgtgctgaaatggaatgatatctcagacataatatttattgaaaaaaacaaggtaaagcattgtgtatgatatgcacatgtagaaaaatattttagagaattagtatttctttatgatttgcagtagggcatatagagtcagaaatgaggaatgataccagaagaattcaaaatcctagaaggtgagcaaaatgttactaaaccattgctatacaggccttctgcgacttgccccaaaaagcacttcaaatatctgaggacactgatgattttttcccaggaaaatgggccagacgcagagaagtcttcctggaattatcttttcctttccatctctgatgctggtgccatttgcaggtcctggctatttctgcctcagtgaattactacgaaacttcccagctgatgtctctgcttctggtcctgccctgttcctctccactctccacagtgctcctgagtcaccttctagttatacctctgattacattactgtcctgcatgactctcaagcccacagggtaaaatccaaacatggtatggcctgggtagccctctgcaatctagctcttgcctgtgaattaggattaggtgactgaggattaaggattaagaacatgtgctttttggagctaggccaatataggtttgagccctggttctatttctctatcttcatttctcactgtctccctttcctcacttaccagccaggcttaattaggcaagacctcccactatgccctgctacgttacatcttgatagatttgcttatgatgacatagctgtccggtacagccttaacttgctaaaatgcacccgctttttttcaagacttagtttaaccacaacttcccccaagacatttttgtcccactcaccatttctgacctttctatattccctactgactcaggcagcttgccagagctgttcttgacattgcatgactttctccactttcatttaaaaattacacattcttggtaaatggcaagattttaataaaagcttccacggcaggccaattatagggtagaaggtgagggagttgaggagaggaagttggagaagttggggagagtggatataaggaaggtagggggagccatttgttggtatgggtcatttatactttagtcccttagaacttggtgtatttctgcatcactcttttaattaatcctaaatcaaatttctatgttaagcatcgtatgactcagaattacttgtgctaggaaagagcagtttgtagttaagagagaaaaggtttatataataaaagcacattaaattgatatgaatttattcaaaacatctctttgttgaaacatgactgctattctattctgttctattttgacatattgtatttttctttgttaaagaagtttcaagcttgctcccgtgaaaagccatgtcttctggtccattgccatttgcccagttcaatttaaataactctgtgggttggaggactgcttcctctgttatcatctctgtggcctgctactactgctatttgaaatcaccaagttatctctgatgccagatatcaaataggcctcagtgagagggggcacctctaatgtttcaggtaaggttggaaattcttcccgggtggggccagttactaacattttaagtgatgggcccagctctctcctctgaatgggaccaggtatttaactttctttggctatttattttattaaatcctttcttttaaaatatgtgaagtaacactcaggaaagtacataaaactaaatgtatgataaaatgactaaagcatgtaactttcacctagaaattgccattaaccccaagaacccctgtatatttctttccagtggtgccacttgccctttaatcctggaggtagccatcatcctgactttttatttttatttttttgagacagcattctcactgttgccccggctggagtactgtagtgtgatctctgcccactgcaacctctgcttcttgggctcaagccatcctcctgcctcagcctcctgagtagttgggactacaggtgtgtgtcaccacaccccgctaatttttgtattttttttgtattttttgtagagatggggtttcaccaggttgcccagggtttatagttttaacacctatgaatgtttctttaagcaaaatagtttattttgatctttaagttatgaacctatatgtggattaatactatatatatatatttgtttctctctctatgtatctctctatatatttgtttctctctatatatttgtttctggcttctttcccttaacatccatgtggtttgctagaggtcattaattttcatcaatatttagccagctgtttttactaatgtagtacaagtgagtgctatcacttttttgttcaagaaagacaagtcaataaatattgtgtgttctttccttccttgtcttcctttgaagtttaaattcaggaatgcaatcaatctgaagaaagccaccaaagacagaaataaataggccatgagatactcactaacgacgttggcttgtccggtgaatatggtgtactggagctcgtaggagaccacgctgaactcatcatcggaggtccaatgcacagtgatggtgtcatatgaagctgtgcagagctcttctctaattgtgggagggttgggagctgtgggggtcaagaatgcttatcagtggaaaagcacacacaactgggataccatttcagaggagatgtttgacagttaagcaggtccttctcaataggtccatcaggactactatcctagagatggtgaccccaatctaaagaatatctgattggctggttattgcttttgtttttaataaggagtgtgactagagtcagccagtatggactttctgtgtttatcatgagatcatgagaatatgtttgggaggttaaacaaataatactttcttgtgcatgaaggaaaacttgtcaaataaaaagtaaacaagataaagtttcatagctgcattcactttgggaggttggctaactttttcagtaaaggccttgatggtaaatgtttccagctttgtgggccatacagtctctgttgcaactagtcaactctgccattgtagcatgaaaacagtcacaacttatacatgtgggcatggccaggttccaataaaactttatttacaaatataggtagagggtcagatttgggctgtaacccaaagttcaccaacccctgacctattaatacgtggtgccagatacttatatctttaggcacccaattgaaaaaatacttatgtttgttatcctacaaaaaatcagccacataattgtttgaatttttctttcattagatgtttcgatgacttacataaaaaaaagaacttactagtccagccctattttcttctcatttctcaactcatgcgatatttcaaattcagaagaccatgattcatagtcaatcatatctaaaaggtacattttccttccccaaggaaaaaacttttttttggcatttggttaatttatcattgtagaaggctgctgttttatttctttaacacattctggagcagagaagtctaagtcctaccaaaataatgagtttaaaatgacttctactgaattgatttcagtaactggttttatgagaagagtatgtgagcaaggaaaatatgagaaaatgagtgctttgcattgtaaataatattttagagggaggggttggcaaactgtgactgtgggccaagtctggcccactgcctgtttttgtaaataaagttttattggaacacagccagattcattcatttatgtattgtctatggctgctttggagcaacagcaaagttgagtagttgtggccatatggactgcaaagcctaaagtgtctactatctggtggtttgcagtcaaagtttgctgacctctggtttagagaattgatccagggcctttacttccactcttctacccactagaatctcacttcaaaaggagaaacatacctgcactctacaaactaggagcaacctttgcttgtactatttcagagttatttcctgctctaaattatgattagaattgatgagtcctaagcaaacccaaagaggaagaaaagtttataaaaactgtaaatttaaactctgcgttagtagtcttcactttgctttttgaatatacctctaggacaagtatcacagaagcaagtctacggtattaagtcaattagcttagctttatctattggttctgaattccagaaacattgttgagcacctccaacgtgacaggcatggcattaaattgtgcattaagacagaagggttctacataacctttaaagcattctttctggaatatgtatttgtacatctgtctcctgaagtattcacatgtgagatttagtgtcatgtggtatgacttggatgtgcatgaatcagtgacaccaatcaggatatgcattccacggaggaggtccagctgcatcgtaaaatgtgcttattattgtctgtgtggtccctgttggtgtgggatcactcctgcatggaccagtgaagaaatacttactctctcacaatttaaacagttcattgaattatttctccatcaaccattgtagaaaaattttgttctgtattgcaatatacaattaaatagaaagaaaacgtatgttcaaaataggcaagtagctgtgagacacatggtagtagccataatcaggaaggaaatgtcacctctatgggttattaacttgatataccacttagaggcatgtcataggaaaaaaaaaatcttgtttttacaatgagacaggctaaccttattttgactgtaaacccaatgagtttgtcctgagaagtcaatactcaatttagtgtaaatgagaacagcagcatgctgccaatttcaatactcatggaatcagtaccagaagtgttattttcttgtctctgtcacaaacaccacccaaggaatggtgggctaatactccacaaagacttcatttcctgcttacaaatgtcataaactatttggacttggcagtatcagccaagcatcatatgttatggtcaggatcgatgttatgtctagaaatggactgaatttgtatttggggttgacagctcagaagacataatagcaggtaccccatatggcctttagtttgaaataaacagccatcgggatgaaatatggtgtatgttacaattcagtctaaactactttcacaatttcccctttaatcaatacttttgcattcctatagagattaaaatgggtatatgttgttgaaatactatgaaataattattgggaaatggcaagggcacattcttgtcaataagactgattctgggcagaatggccatgtgcctaggcaaatacttaattttccagtcttttctgtccctggacatgaccttgtaacacagatacagcccaccagacataagtggaagtttgctaggcgggtcttctgatcaagctttttgtttttctgataaacaaacttcactggcagagcattttgtccatcgtttcccctccacccctttctttttgcctagagcttgagcacaacacttggaggtggagtagtcatgttgtgatcatgtggcaaaaaggcaacacaatgaaggcggcagaggaggaaaaaagaaagagcctggggtctgaggtcgtcactgaaccactgcccagccctggaacacaggcttctcttctgtgactgtaatacaaacactccttgatggttttattcactgctagttggattttttgttgcttgcaactaaactcattcgcaaatgatataagaaaaaggagatttttaacaggatgccactgtgaaaaacagcttagctggagaaagtctagacctgcactgttcaatacaatagccacgagctacatgtggtggtttaaatttcaattaaatttagttgaagttaaataaaagtaaaaattcactagccacatttcaagttttcaatagccccatgtgggaggcagctaacgctggatagtacagatatagaacatatctatcatcatagaaagttttattggatagtgtcagtttaaataaatctcagagttaaaagcttaaataggagggcattatgtacacaaatatttgaaaccaagtttagttccatacggtaaatgcttttttagtcaatttctttcttccttaataggagtggtatgtttgaaagagagagttacataagataagaagtttgtggaatgcctgcctgccttgcttgacaatgcagaaaggctaaaaacggcacattgggtcctcgcaaagaaaaaatgctcatcttctgggtacaatgctccctgaatatagaacccctggccttctatccacagactgtaaaaacaaacatcacacaatgttccctttctcctgctccaccttgttcaatcgctttctcacaaacatgtacacacagaattggaattgagaagctcatgtcacgctaagttagagacgtggtctcttgaaggctgtatgtcttaagtgcagcgcacatctggcttcactgtgtacattgtgctttcctgaagtcgcaggcactggtggctttggctaacacgaataaggttgtctaaacagtccaggttctaccagtgaatattctcagttcctactttagaagttgacagcaaagaaaagtttagaagcatgcttaggaataggagtggcctgaggtttttgttgttttgttgttgtttttgttttttaagctcaaccaagggagaaacaaaacaaaacaaaacaccaaccaggaagcacactgaaacacagcactaggaattccaatgtaaatttgtgacctttgccatggtgacatttgccaagataaaattcagtcttttactagaaagagcagaagtttttggagtttgtacaggtcccagccaaattctaattctgtcattccctagttacctgatttccagcaagacggctgatctctgtcatttgcaaaatggggattataatgctttacctcaactcgatgttgtgcaaattaaaacaagatcacaaatacaaggagatgaagcagtacagacaaccaatcagttagctgccaattttttctctgccaatgtattgtgagttgcttactactatgatatgaaaaataccacagagagatactatttttagcacccacaccttgagagtgagggaaacagtggtaagtatgcttttaatggttgagattctcctttttctcctgtccccagtttagtaatgggctgtgttgttttgatgaaaaaacaaagggcaatgcacagaaattgtttatggaaatatcagtgccattcctaggtcaaaagcccattcctctggttattggggaataactgatctggtggcaaagtgtttatatcactaagtgtgcacaatattaaagagaacataaaagacaatacctgtaaggtaatccagacattctagcagtttcttctctcgggaaaaatctaaggcaaaggtgtcaaatgtgtcattgaggttgatttcaggaattagaacctgggaggatgcagttgccatggagactctgtaatgcaaacaaaacaatgtttcagaaatgtcaagatgactttcaacatcactgcatagaaatgaaaaagaaaaggaaaataaatatctcttaaaaagtgcttttttacacatgagttttaagaggcatctcaaaatgtcacaacacagtaacataaaacaaatgaatgcaagctttaaaaaaaagtgaaggaattggagaaaacaacaaaatggcttgccctcttcctttttactatcaggaaaaaaaattccctgcgaaagcaaaagaatattcatatttcatgttgctgtgtatttaacagtctggcccggtcacgtctaaccccagcaagaagcgcgtagctctaggcatttcttcacacatctgtctgggaaactgtttgttcctttcagacgcaaccctgatccacttcaaaggagagtctccaaaatttcaaactgcataaaaggcaaagtgaatattaaaaaagaatgtttccagatattggattagtttaatcaattactagcctctctctaaaataaacattaaaaagggagttttttgtctggctcattttctttctctttgtattcattttcttgcaccatattcccagcagatgctgtggaaaatattcatgagctttctcacaaatccccccagtggatgcactatttctcttcttcatttaggttttctggttagagttctcatgtataaactaaaaagcaaggcactggtgtgtctcaatctccttctatgtactctcaggttcatttggaaggttcagttattaataatgaacactttgattcaaaaatgcaagtgcttctcttaaaaacaagagaattgtggcatgaagcataccatttctgagcatatcaaatgatgctggactagtaatcttgttgagtttggtattttgttaagttccataaacaacactcttaagagctattatatgcggagtattgcgtaggatgctgggaatttttgagcaaagaaacaaccttgaaacaatttagtactaaatctagttacttattttctaattaagaaaattgatgctcatttatacaaggccacaaagctagctggcagcagcaaggaggagaatttcagatctgtactcttctgtttcatctagaaaaatttcaggccagttactccaagggttatatgtccttttgagtctcttaatggctcttaaagctttggatttacaaatgtaatatatcttggctctaaaaattacatctgtgggtatatatctatacaacaggatattattcagccataaaaagggatgaaacactgacacacgctacgatgtggataaagcctaaaaacattatgctctgtgaaagaagccatcaaaaaggccacatattgtatgatccatttgtatgaaatgtccaaaaaaggcaaaaattcataaagacagggagtagattggtggttgctaggggctaagaggggaggggagatggggagtaactgcttaatgagtataaggcttacttttggtatgatggaagtgttttggaacttgatagaggtggtggctacacaacaatgtgaatgtcctaaatgccactgaatcgtgcattcagaagcagagtctcactatgttgcccaggttggtcttgaactcctgggcccaagcgatcaccctttgggaggccttggcctcccaaagtgctgggattacaggtatgagccaccacacccagccttaaaatggttaattttatgttgtgtaaatttcacccatctaaaaaagaatatacctgtaaaatgctcaaaattcatagaaatacagtttctatagttgtatttctggcagattttcagtgttgtacaggagggaaggagagagcctaatcaacaatgtcataaatgtaatgatactgggattgagagatgcaagtgaagaggtctaagctctggaaacgagtttcaagtgtctgaatgagggtagagaatctaactgcatctcctgaccctttcaccaagaagtagtgaatagcagagttgagtgcttttgttgactaaatattgcaccctggggaattgggctaattattgttaccaacagctgctaatttagactgatggatacggagatggttgctaggcatttttgattgatggtcaagttatactttaaaaatgctttccttatgacccatgaacacaaaaagtccttaaacttcatagaggtcctaggattattctcaacaaatatttatgaagcccttaaactatgctacacaccaaagagcccagaatatatgcattcgatgcagaaaagttaaaagaaatgctaaggtgccatttgaacccttaaaagatatcgcaaagtgaaacgccaattaattctccatcataatgtctggcagggagaactgttctgagctactgggaaacaagcaccaaacttgcaattgcatttccctggctttagcagtttccctgcccactggcagaaacctctttattcagtctcatccaaaatagattttgttcccaagtttctcctggttccatggtctacaaacaattaaataaaacattttaaattgagtgacactgttaataatgtctaccatcttgatggtaggaactttgttacatgggaaccaaaaggatcaaagttcctagcctgggaggtaaaggctgacagcaagaatcagtggagattactgcagcttttaacacctacacatttgttttttgatggaaggaaagatacttatctttggctacaacttcaaattcctaattggagtgacaggcaaggggaaatctgccaaattcaacattttaggccatgtttttatttcccaaatccttattgcccatcttctggccttttggataagttgccaaatccactagggctgttagcgctatgccactttctcaacttcttgctttacagccatgtctgggacacatggggccagttttccagaaggtggacgtgtctggagctatgctgctcacaaggcttctgccaaacaatgtgcatcaccaaagtaaaacccagtgaggcctcacagtaacaagataggtttactttggtcagcccaggaattcccaaacacatttggccttgaaaacgtgcagttatcttaatgcctatgaacaccctgcagacacacttccaaaaccactgatcagatatgctctaattctttgaaccaagcaacatcttttcagaattgacaactggagttcttggctttgtattctggaaaagatccttgaactgcctattgtagtgaggaacagaaggatcaccttgaggagtctgagaacctcctaggtgctttgaacaataggtactattcagagggaagtttctttttatcaccttcttgatacagataagttactgctataagggattttaattctagattcttcataagcagaccaactttcttatgcctggacttagtgaatagctttgcttatttaaaataatgctataaaggtgcatatacaatcacaccaaagacctatctactagtgtagcttgagaatatagtacattatacatttgcattcatctagtgagtgggaaggaagagaactagtatttgttgcatgttcatcttgtgacagaaactaggctaatgtttttactacattattgcattttatccccacaataaccatcttaggtaggaataattagtcccgtcttacagatttatggatccattcattcattcactcattcactcatgtcaggcagctcgcaatgtgctggggctataatggtaaaaacaaggtggctagggtacctgcctacttggagtatatgagcaaaattagccaatgttaatgagcagcctcaatgctatctataattactaagcaattagcacagagccaaacaaccggttccaaagcaaaagcatctcctacaatgtaaagcttgaggctctctccccttttggagttgtttgatgtttctgaaatgaaagaaaaatttacagttttgattcagcttgtaggaggacatatccactttaagtcgcttaacgatgcagaaaatctcatctaagtctcacttcaagaatgcctgcgggattaaaagtttgttctgggctccacacctgaattgaagaataaagattgtttggaagtatacaggagccaaagcccaaggcaggcacaataggagacagaaaaaagaagtcatgtcctagagaagaatgttaagtgacaggttgatgaataggggcaggtagacagagagtagcattggaaaaaagacacacaaggcgggctagactgacatgttgaaacgtgaaaacagagatccaactaacactcatggagtagctataatgctaatgacctgttcttaggaacttaaagcaatgtcatcacaacagtgacagctattctgaaaccaatttttttaaataatttttttattagtaaaaacaattcttttgtgggtatatagtaggtgtttatatttatggagtacatgagatattttgatacaggcatgcaatgtgaaataagcacatcacagagaataagttatcaatcccctcaagcatttatcctttgggttacaaacaatccagttacatttttaagtttttttttaaacatacgattaagttattattgactatagtcaccctattgtgctaccaaatagtaggtcttattcattctttcttttttcccattaaccatccctacccacccccactcccacaactccctactatacttcccagcctctggtaaccatccttctactctctatgtccgtgagttcaatcgttttgatttttagattccacaaataagtgacagcatgcaatgtttgtctttctgtgcctggcttagttcacttaatgatctgcagttccatccatgttgttgcaaataactagatctcatccttttttatggttgactagtactccattgtatatatgtaccacattttctttattcattcatctgttgatggacacttaggttgcttccaaatcttagctattgtaaaagtgctgcagcaaacacaggagtgaggatatctcttctatatactgatttcgtttcttttgggtatgtacctagcagtaggattgctggattatatgatagcttaatttttggatttttgaggaacctccaaactgttcctgaacccaattttctaagtagaaaatagctcaaagacccatagttaaaaagtggcagtgctaggactggaacccaggtctgccaacttctagtctaagcccagtgtcctttttctatatcctagctgctggaaggatagaaaggctcaggaattagccaagaggattgacaaatagtgatgggaggagaggggactgcagaaacagagacaaggctcttggcaaatttttacaggctctgtgaattcaaacttgacagaagcacattctttgtagaaagagaaatcaaagtcatgttcctgctcttgatgagttgggcttgttatagagagagctgaatgggagcagatacgtcccactggaactgagggagattgtatgtgggcattcccacacctgtgctatacttcagatgcatatcttctttcagcaataactgttatggggtcacatcatccctggtcactaggtaagaatttattcatgtgacacttggttgaatcttcagggattgatgaggaatgcagttcataatagccatttcatctggacatctcaaagttcatagatggagaaaagtactcctggattccggttggaaaccgtgacctaagtgtaaacgctatctattagtgtcctaggtacactggagtattagtgctatttgcagtttttaactttagggtgaatattgagcaactggatatggcccagggaaaataaacatttggaaccaaggaatcaggaggaaagaaatgggcctctcagagtaaggaggagagcatcttaagtacataacagggatgatagccagctgttatccatgccttttagaagagataagtatctaatcagctacaaaaggaattttcctcaaatataagaaataatacagtcaagccgattggacagtagaccagagttgtaaaaacacgatacattactctttaagaagagtgaaaatggagatgtcaatcactcctcctctatgcgatattttgagaattagcacaagtttccgaaacaagcaagcactcaataaatgttagtttcctttctctttctttgaataaatttgagtcataagatggcgagtattttttttcctaggccaggggttggcaaagtatggtctactgcctgtttttgtaatggttttattggcacacagccacacccatttgtttctatattatctatggccgctttagagctagctacaatggcagagttgagtagctgtgaccaagaccttacaacctgcaaagcggaaaaatatttacttgatgatcctttatagaaaaagtctgctgatctctgctctaggatgaagatcagcatgcatgagctctctggggtcttctagagataggattctattattgctttggataaagggcagttgactctgaaaattagaatgaatgaagtcaaggccattagcctgagttagagatgtcatttatgtggcattggctgtacctggcccagcctagtgcttctctttgttttttcatttatttattttttttggagaaagagtctcgctctgttgcccaggctgaagtgcagtggcacgatctcggctcactgcaacctccgcctcccaggttcaagcaattctcctgcctcagcctcccaagtagctgggattacaggcgcctgccaccacgcctagctaatttttgtatttttttttttagcagggaccaggtttcaccatgttagtcaggctggtctcgaactcctgacctcaggtgatccacccgccttggcctcccaaagtgctgggattacaggcgtgagccaccgtgcccggctagtgcttttctttggatccactagaattgctataggtgtttgtgtcagtgaagatgagcaatttttataccaaccaagtatgtgtgccgaaaaaatacttatctttgccagttttactgctgagccaaccattcagataacatcacattaaagctccctacctgagaataaagagtattttaaaagaagcccgtatgaggttgacagtttggtcctttctctcctgcgtgagttggccttgaccttttcaggtgaggccaagctcctcaaccaaatgaaaatgggcctaacagagaacaacacctgtgtgattttaaaaaaaaatagatgagccctgtgatggaagaaaatattccctttaatgtttttgccttcattttgactctttgttatcaagtgtacgataacatcacatctgagagtcacaataaatgctgtttttgtgccatcataagctcccccctcgtccaaaagcaggttgattttattctttctaactggtggactcttgtttcaaaggccttgaactccagactccaggctgttactgaaagggctttcacatgtcaaaaggaagcatctttagctggaacaaaacagctcaaagcctctattctctctggtactgagccttgaaaatgaaaataaaagcaaggcgagggcaagaccaaccaatcacagcgcagatacaagagcccagcagccgagaaattcccaggggcccctgcactcacctctcggtgatattcttagcagtctgtaggaaacgcgcatgatcattctccttcagagagtgttccgcttgggagatgagtgatgctgaccgctcaatgcactgtttgcagtttgcaatctgctgagccagtttgcgaagcctcatcaccttgaacaaaagaggcatggagagagatggttacatgggtggtcttgcttaatgaaaaggcatcaggctggatccttcattttgttgtgttatccttccataaaagttcaaaaagtaggcatagagatatatcaaaatatggaaagctccgttatgggactctggtttagatattccttatctcattggagaagcattgctaattcgttttacgaggaaacactgaattgtgaattgcttccctgttgatgggaaaaaaaggtgttgcccagtggcaacttacaaagggtcaccagacgtcttccctggactattccacacaatgactgcaagactgtagggaaccctggaactttctctatctcaggtttatcttcttttcatcaagaagataaaacatctttataggtggtgaatctatggtttaaatgaaaaccattttctaaaaagtgttttttgtaattcatgtaataaaatcgagaatggaaagcattaagtgttactatttcccacactacctaaaactcatgtgttaaattaacagaaagggagcatttttcccattgattaatatttttcctgttgagcagatgagagaaagccaaaaaaagcacagctgggccatttcccctcactgggaacgtcatttccaggcactttgtgcttacttgataactaggaactattttgataagcatttcccagttgggataaaaacgcatgattgcttcacaacctccattccaattcctgattctgtctcgcttgaaaatgtccctcaaacataattgaccataacctccggggcaggccaagataagtccaaggtaacccacttgaccgttcgctcttgtgtttgaaatgtgctgtgagatgaagtcctctagccagaagccaagttaaaattagacagctaattggaattgctgtgtgcctactgcccccaaccacacacccagggacaggtttcaaccggctttatgataattctggaatggaaaatagccctgggtgaaagggtacggaggagaccagtcaatctgtcttacagacaaggctggcccaaggctctctccagaattcctgctaattccaagaaattctttctttctccaagtcgtcattaccatccctgtataactctaatctaagaaaaggaaggaaagagatgtcagaacttgaggcctctaaggaacatccaattccaagtatgtactataagcaaacaaaggaaattcatactgaattagaagcagcaggcacaagatttcaggcaagggtgaaaaaaattcctgaaagagtcagagaatgaagtgtcaaaactttagggcaaataatataggatcgtgagcctggtaaaagacttaatgcattataattatagttactgtccccagtggattaattgtattcattagtggaataaaataacacttattttacaccaaatagaatttagcctctggcatcattctatctggaggcaaagctaaggaaggcatccagtacgcgcaggatattagaacatgttcataagaaactgtcagaggaaggaaaattccagaaggaaaactaatttacagtccacaggacaaaccaagtgaatggaatatttaatcacacagcataaagaatcatttaaattacatggccgaattgcagatgtttaatacaattccagcaaaagaaaataaggtcaaaatattcctttagaataacttcatgacaactacttatcctttagatatgcctattaaagaccacacacatttcaaatgcgatgatgcttgaactccagtttcttcttttctttttctatcatgatattgaacattaaaagtgacataacaggaaaaagaataaaagagccctaaatcatgcaaaaattaaagcaagacaaaatgagagtcgcctgtgaaaatatcggaatgttctacagagaacaattttgggcataattttagttataggttagtgtacaatttcatctgatacatctgatttgagctttgcaaacctagtgtaaaagaatcagctgggcatcattttgaaagaaaaacagtagatgtttgggtctacgctccaatatttgagttaaggagttgtaattcgcagagcaggaggaatttccatttcaacaagcaacaaatgtttttaagcctgcaggtgatgaatcattaggacagtcaggactagcctttaaaaaaccaaatagaagaggagaaaagcaaatagcagagtgcattcctggtagaaaaggcaagttgggttttgtaaaaccttttgtgtgtgtgcatgcgtgcacgctgtattgtgatgtcatatatatttcttactgcgggttacagtaaaaaaaaaaagaaaaaagaaaaacactgctctaagttaggtgttcctaggctgtgatctgtgggccaaatcagcatacagcctgtttgtgtaaataaagctttattggcatactaccacactcattggttacacataatctatggctgctttcttgctacaatgttgtgcagaagtgagttgctgcaacagagaccgtatggcaaagcctaaaatatttgttatctggcccttgacagaaaagtcggctaacccctggcttaaatgattacagtcagatggccctgatttgcagcacactctgaaacactgtcctacttgtcacagcacttcaaactcagacacccagcatggagcgaagtacttagttttctattagacaacactttttaatgtattatttttaaaagttgacaaggtgaataaaatttgatgtttaaaaaaattagatactgacacataaaaagattctgtatgtgtctgccttaatgctgcaagggaaatattttccagtcaactcttcatttttcctttgggaagtgagattaccacattgcaacttttggaatttactctctactagtcatggaaatagtttgcctgctggaatctccttttagcagggacacagggctgtttatatcattttatttgctgtttattataccttacacattcttttaaaagccgctttattttgcttgaaatgcgttttaaacacttatttttatataaatctttttatatgtatgtaggatacacaacccaaaacaattaggtccaaacaatgcatcctcaattcacacaagtatctgaactgaaaatgaggcctgttctcaccatctctttaaggccatggagagctcaacatttagtccaagttaattttcttaaacttttaagatttagtgtacataaaaggcagtgaagaaaagggacccttattttgttgagctttggccttcagaagtctaccatagatctctgtgtctgaacattaaatgaatgaactcaatctgaatttagctctttgtgtgttgacatgaaacttatccccgactactgaaaaaaagaagaaaattcttttccagggagcctcatggcttaagactctccagtccgcccacctataaaggctgtcgagttaatttgtttcagagaatgtacaatggtccaagagcaggaatcatcagtaggtactaacgtgtaataatatcacctgcttggtgacctcgtcaattgcagaatttgaggtgagtttgacagctgagtgactagtgtcagagatagacaggggcaaaataaggcagttgatgaaactcacttttgtgatctccacaattctgcctggttcttgctccacctgcccacttccaattgcttgtcagaaggccccaccatccgttctttagactcaatgccctcagttgccactgccatcctggggtgcagggacccaagtcccccagtgaaccccaagtccacacttgccctccctgtctggcacctcagatttccacgggttggcattcacacccttcctcttaaaaacaggcctctgacacaatatgccctggctagggacttgagtcactgtgagtttcagggtttggaatgaactagtccttggtcatgtgccaaagtactagctcaagagaaaaggagtgcggccctcatctttcccaagtaacatctgctttctaagattgccttctgagataatgttgctgagcaaatgtatactttttaaaaagtgaagcattccatacatacaaaaaatttaagaatataatgaactgtcctgtacatagtaccaggtttactaaatctcagtattttcatcatatgagcttcagagttttcaaaaggaagtaaaaaagatttttttttgagacagggtcttgctctgtcacccaggctggagtgtagtagcatgattacggatcactgcagctttgaccttccaggctcaagcaatcctcctgcctcagccacctgactagctgagatcacaggcacatgccactacacccggctaatttttatttttatttttattttttgtagtgatggggaaccactatgttgcccaggctggtctcaaactcctgggctcaagtgatcctctcgccttggcctcccaaagtgctgggattataggcatgagccaccacacctggtggtaaaatattattgatagcattaaagcctctgtgtggcactttataatctcactcatgtctctctccagaagaaaagaccctctcaaatttagagctgatcactcccaaacatgtttatgtacacatacctaaacaatgtatgggattttttggtagtttattaaattttatataatgcttgtacaaataattatataactttcttctgtttttgtgatttgtccgtgctaatacatatcaccctagttcattaattttaatttctgaagactttttcattatataatacacaatttatatgtctaataaacagctgaattgagatagaatttacatatcataaacagtacatacttaaagtgcaaatttgacactttttcaaatatgtatgcacccatgaaacagtcaccacagtcaagataataaacatatatatcatgccccacaatttactcctgcccctttgtaattaactgtgcccatcctttcctgtcatcccatccctaaaagcaatcattgatttgctttttgtcactgtagattagtagaaagtgccgtttctcgaatttcatatgaatctactcatacagaatatactactttctgtctgactcctttcacgcaccttaattatactgagatccatccatgttgttgcattataactagtgtaactagtttattcctttttattgccaaagagtatttcattgtgtgattatgacacaaattgtttacccattcatctgttgatggactttgggccatttctagtttggggctattacaagtaaaattaacatgaaatttcacctacaagtcttttttttttttttttttggatagggtctcactctatcacccgggctggagtgtagtggcatcatttcagctcactgcaacctctgcttcttgggctcaagcgattctccagcctcagcctcctgtgtagctgggattacaggagtgagccaccaacacctggctaatttttgtgttttttgtagagacagggtttcaccatgttgcctaggctggtctcaaactcctgagctcaaagcaatccacctgcctcggcctcccaaagtgctgggattacaggtgtgagccaccgtgaccagtctcacctacaagttttgtatggacatagctttcctttctcttggtaaatacctaaatggctggatcatatggtaagtgtatgcttacttaagaaactgccagctttccagcatgtactactttaattcccacctccagcagtttgtgagaggctctggttccttcacatttttgccaacacttggtatgcgccatcttttgaattttaattattctagtaggtaggaagcagtatctcattgaaatttattttgcatttcattaatgactaatgatactgaaccatcttttcacgtgcttatttaccatctgtgatggttaatactgagtgccaacttgattggattgaaggatgcaagtattgatcctgggtgtgtctgtgagggtgttgccaaaggacattaacacttgagtcagtgggctggggaaggcagacccacccttaattgggtgggcaccatctaatcagctgccagcgaatataagcaggcagaaaaacatgaaaaggcaagactggcttagcctccccgtctacatctttctcccatgctggatgcttcctgccctcgaacatcggactccaagttcttcagttttgagagtcggactggctctccctgctagcttgcagacggcctattgtgggactttgtgattgtgtaagttaatacttaataaactcctctctctctatatatatatatcctattagttctgtcgctctagagaaccctaagtaatacatcatccacacctcttctttggtaaagttttcaaatcttttatgcattttggtgaaaggcttgttttcttattaatgagttttgagaatttgttatatattctggatacaatcctttattaaaataaataatttgtaaatattttcgcctagtttgtggttggtcttttcagtctcttaacagtgcattctgaagaggtttttaattttgatgaaacccaacatataaatattttcttttatggataatgcttttgtcatctgtatgtaaagaatctttgcctaacccaaggtcaagatctcctccacgttttcttctaggagttttacagcttttaccttttacatttagatatataatcaattttgagtaaagtcttgtatataatgtgaagtatggatcaaacttcatattcttacatacagatatccaattgctccagcaccagttactaaaaagacaatcctttctccactgaaattgcctttgcatctttgttgaaaatcacttgtccatatatgtatgaatctacttctcaagtctttttgctgatcctttgatctatttgtctatctttatacaaataccaccttatattgatttctgaagccttataataaatcttgaaatcagctgatgttagttctccaactttgttattattttcaaagtttttttttttttttttgagacagagtctctctctgtcgcccgggccggagtgcagtggcgcaatctcggctcactgcaaactccgcctcccggattcacgccattctcctgcctcagcctcctgagtagctgggactacaggctcctgccaccatgtctggcttattttttgtatttttagtagagacggggtttcaccgtgttagccaggatggtctcgatctcctgacctcgtgatccgcccgcctcggcttcccaaagtgctgggattataggtgtgagccaccgcacccggtctatttttcaaagttttaaatgattatgctatatcctttgcattctaatatgaactttagaatcggcttgtcaatttctgcaaaataacctgctggaattttcattgagattatgttgaatctacaggttgatgtggaaagaacagaaatcataacttttctgagtctttaccccataacatgatacatggcttcattttttagtcgtctttaatttctctcagcaatattttgtagttttcaaggtctttcaagtctcacccatcttttgttagatttatcactaagtatttcatatttgtgaggctgttttaaatggaatttctttttttaaatttcaattttcaattgttactaatatattgaaatgaaattggcttttgtattgtgatcttattctatgtcagatgtttcagtctttgctttatggttgtttttttaaaattgtttggtctaaaaagaaaaatccctcctactctgggatcatatgtatgttttctgttaatgtggttctgttaacagatattctgtagttgagccatccttgtattataagaataaaggctattttgatgtgtttaataaaacactgatggattacattttctcatattaaaaaaaatttttgtgtctatattcatgggtgatattctctcactctagattttttaatgttgtatgtatttggtatcaagatcatacactctacataaaatgtcttttttctattttctgaagtagtttatatgagaatgagattattagttcctggaacttctgttaaagtaagctatagaactgtgggaggctggtgccattttggggcagaaatgcaagttgatggacattttcaatgacttattaaatgtcttctgcttttaaatttttggtttattcaggttttccgctacttctttatgtaagttttcaaattattggcatgaagacatttacacaattttcttatgtttaaaaaagtctctactgtatttatggtatatttgtttatggggccccacactcttttttccttcatcaaccttaactacagattggtcttttaaattattttttacaagtaaaactcctcctgattaagggctggcaaacttttcctgtagaggaccagatagtcaatattttaggctttgaagaccacatactgtctctgtcacacatatattgtttttctttattttttttaacaaccttttaaaaatgggggaaaaggcactttttttattcacagatgtttcaaaattaggctgcgagttgttctttgctgacagctgttcttgtttgtttcctgtttttctttcatttacttttcttcctttatttctttcctctgctttcactgggtttatcctgttgtgctttttctagctttatttgaaagctaattttttacttttagtattaccttttttgggggtggggggacagggtcttgccgtgttgcccaggctggtcttgaactcctggactcaagcaatcctcctgcctcggcctcccaaagcgttgggactacaggtgtgagctaccatgcccagcctctttttcaaaagaattaaagcctgtaagtttgccttcagatacttttttgctgcttactacttatgatatattatagttcttttactgtggtttacttctacatttaaaaaatattactgtgaagatatatttatatatgaatagattttagtgtcaaaaaactatagaaactattattttattgttgataatatctaatgagatacagtgtgtggtcttagaggcagggttctatggtattcagtttttgaaatttgctgaaatacttgctttcaaccaagtgcatgattattattttaaaaatgccccatgtgtaggttttcctatatactttcctatcttttgagttcaaactcagtcggcatttgtcaaactttaatgtcactcagacgtaaaagaatgcgttttatggcattcccaaggtggtgaccaaaactcagtttccaaatttccactgcagctgagttttctttctaatttcaatatctatatttttccctccaaaactgctaatttgttgctttcctatctatttttttatttcatttccttcttttgtggcttcactttttttgctcttttgaaagagaagttattccttcatttctttctttgaacatcttaagactacttcttttaaagtctttttcttattttcctataaaattaattttatctggggtaagataatgttgtctgctgattttgctggctgtatgtttagaaatttaagatttctttatatactttgaaattaaacttagagtttcagttttaaagggaagtaatttataattctttcctctctcaccctccttgctcagcctaccctgctctgatagttttccagttgccttcacctggcccttgaggtcattattcaggaatcccatccttatctctgtgctcctgttctgtgtgggtatcagaaacagtgtgaacacaggcttcaagctaacaatgtgactttgctaaaagctatgatatgagggaaaggttggcaataatttttgactgaagcatgaagccttctatagcccatggcattaaataatgagcctgatttccattccccatcccatctggagcacttctaggtcctttccccaaagcttcaagaactatttatccacaggagctaaagccaaagctactttggcctcttccagaccaaatcccagtagcctgtatcctcagccacagtcatggcttttcagttttgtctcatttctggcctgtggagatgtttatcttgtttttggttcagctatatgtctttgcttttgcattttattaagttctttattactgacatgtatttggggtagaacgagtgcaccgaagcataaactccatgcatcactatggctggaacttggggacacctgcactactctgatctagctcatgagagaaaccctggtggtgggaagtccaagctaagtaagagaagggaaggcaagctagccaggaagttgtggtggagtgcccttgcaggctgaataagggctctcaatgctgcccacatcctaatctcaggaatctttgaatatgttactcacatggcaaaagggactttacagacatgattaaggatcacgagatggggatgttaccctgaattatccaggtaatcccaatgtagtcacaagggtcgttataagagaaaggcaggaaggcctgtgtcagagaagacgtgaggatgggaagagaggtcagattgatgcaaagagaccatgagccaaagaatgcaggctacctgtaagagctagaaaaggcaagaaaaaatggattttcccctaaagcttccagaaagaaacagcactgccaaaaccttgactgtcgattttgtttaacccagtgagatcgatttttggatttccgaatttcagcacactgagataataaatctatgttgtctcaagccaccaagtttaaggtaatttgttattgcagcaataagaaactagtaagagtaaggtgcaaaacctcaattagagaggaagaggaagtgctttttcaaaaaaattatttatttatttattttttactttgagatctattgcatggcatggtgaaaacagcaaataaataataacgtattatacagttcaaaatcactaagcaagtaaatttcaaatgttctcaccacaagaaaaggctttgagatgatggatatgttaattagcttgatttagttattccatatttcatccataaattataacatcactttgcactccataaatataaatgtttgtcaatttaaaattaaaaatgaaaataaactaatatgtgtactgagagctaatctctgcatgcaaccatgtaaagatagcaaattaccttctgtatgcatatgaataattaattgtgactgtacttcaggtggccatgtgtctgagaacctggaatacttccagaattaagagatgtgcacctatgatgcacgatgatgatggaagatgaaatatatcctgtaaggattccagatggacactcagtgctcttctaaattggacaattcgtatgtggggaaaagtagcttttcggcacatgtgagtccttggccagggaataatttcatgttaatctgttaatctactataccagcatcaataactatttgatttcactattttttagatcattttaataatttatgtgtataaatattttgtaatctatatagacagagtaatctaaaacattgtacaatattagaaggtacctgttaaattttgtggaaaacacagaaaaccacatacattagccacggttatctctgtgtttcacttaaaacttgctagtatgttttaattatatatattttgttttaaagtacaactatgaacaataataatagaaatggatgaatttattggatcataaataaacgcttctatttttaaaaatccatagaaaaattatccttggccaggcatagtagctcgtgcctgtcatcccagcattttaggaggcagaggcagaggcaggtgacttgcttgagcccaggacttcgagaccagcctagacaacatggtgaaaccctgtctctacaaaaaatataaaaattagccaggtgtggtggcccatgcctgtagtcccagctactcaggaggctaaggcaggaggattgtctgagcccgggaggcggcagttgcagtgagccatgatcgtgccactgcactccagcctgggtgacagataaagactgtctcaaaaaaaaaaaaaaaaaaaaagaagaagaaaaaagaaagaaaaattatccctgaatgtggcagagaattgggtaaaattaaaaggatcataagtatttcaataaaaacatgactaattttaaaatagaataaactgatggattataaagtgaccaacagtttgtgaatgaattttgaataaataagaaagcagctataaagaatgtatgtcaatttatcttaaaaatatagtttgctgtaaaacaataggaaattaaaacatagaaacattagaacattagaaaagaagtattattactatatccacaaaggagtatatgatatagtgaaaccccaggggttttgggaccatgaagttatacctgtatacatttcctcaaaaacatgggaaagtacttcataatttctataaataaagtcagattcatttttaatttatgtaatgctatgctagtttctaggatatcacaatgaatacaaaataaactctgcctccacagaacccaccttctcatagacaagtgagatagaaaacaatggccatgatagacaagacctttatgctacctcctggcgctgggcaatggagcagcccttgtatcacaggtcttcacaggagaccatagtacaaagaaaaggatggagaaaaaactgccaagcaaaggccttttaactaagtcttaaagacttaagagggaattatagaatgtatagaaaaagagggttctcaacatttccaaagtccctggagtgtattaggatttattttctccaggtagagaatatgaaatcttctgccctagaaatcataccttcccttctttgatcttggttccaataatctgtcgtctttgctgaatgatctcaatgagaagatcacactcctctgtcaatttggcttcttgacgtgatgcattgacctacaggataagtacaatggtaagtgttaatttggcctttgtttttcagttaagtgctatttttaatgtatactaggatgtttctagtaatctctgaaaagatattttaaatgttaactctttgtccgattacgcaaggattgcaaatataggacttacatggccacttcctaatttgcatccttggaaaacattattatccaatgacagcagtcttttctactaagccagactcagctgcagaatctttaacataacatgtacatagccattaccaattagttggaaaatgatgtgtcatgtgaaatatatttgcaattcctacttttatatttttaaaaagtatcaaatttgccctgttaaacataaaaaaagtaagttaaaaaaaatcaatattattcttttatggaggacagattactatcaatctcttttagacaaattttccgtaagcaatgtagcaagcctgtatcacatttgacatttctcttaaatacaaacatcaattttgtatctaatcactataaaacataaaaagcacaaaaagatggttcaatagtttattaatcttatgacataatttaaaattatactcctagtatacttctgaaagatcaaggttctacaacgaaagcataacattcatgtggaaaggtggatcattagagtggcttgtatttgaagtttttgtgacttgcattcaagggaggcttacaattagctcattcttggcaactaggcctgggaaatactctgcacatgctatttcctccatctcatggcaattctgaaatgcttattcacaaacagaaacccagaaaccacagctgtgagagatggagatagcaggcatgaggtttattattttaacacagccacaggagaagttgcaatgttacaaagaatgacaatggcattgattattctagcatatctcagggaggagacatggcccagtccctagcctttttgatttggaaggctttaattggagtaatttcattctctatgaatgagataaactggaagtagggtcatgagttcaagataaaaatccactgatggctgttcacagaaaccatgtcctgtttccagaggcccaggattccttgaattttattcctgatcattgttcagacataacatagagactactcaagacatcttattgagaagatgatagtcattggccatttgcagtaaaccatgagattatgtcctacatcagtttagcagacagagttatttgctaagtatttgtttaatgaacaaagagaaaaattaaaaatgcattgactgagaagtacaaatgtggaactcaggctaatatttcaaggaggataatcattaggcttcatttctcttattgttatttttatgtcatcatttctagctccccttgaggtttctcaaataaatttagctattgacatatttacttgaaacttacactcagtaaatttcttctgtttccttttgacctcaaactgaatttaataactgactacaactgagttatgaaaaggatgggaccatattgataacatgagcacattatgatggaggaagtaaaatttctagaaagtagcactgacgaagcttctttgctcgaccaaactttagtgttgaactttctcctgggcccttctgcgcactttcttgtaaaccagttttagcaagaaccctgctgagttggtttagccagaatcctccatctccatatctgatcactctcagtatctgattgggttcttcatccttcaccatgccccagaggatgtctgatcaacttggcctaccttcagcaagaatccttttaggtcagtttaaccagaatctcccttacccctgatgtttcctcttagtaattttccatccacttatcatcaccctgctccttggctgtaaatccccactggtccacgtgacattgggagttgagtcccattctatactgaggtctctttccccttattacaatagtcctgaataaaatgtttttacagctttaactactgtccagctctagtttttctttgacagaccccacacttgaaaagtatctactagaataaacccgaagagctaagttgtacttgagaatacgagttaaatctgatagaatgtaagctccatatgggcagggatcttcagctgttgtattaaataaggtatctattccaagcacctggtgccatgtctggcacaaaataggcattcaaaaaatatttgttgaataaataaatagggaaaatgaccttccaagaagagacagggcaaaaatgtaatggagcaagtagttatcactagtaatcactcaacatgcaggtaatggattggtttccaaggactgtgtagacacaaaattatgacctaaggattgttttatttgagggggagggaggaagggagttgattttttttgagacagggtcttgctcttgctctatcactcaggctggagtgcactggtgccataacggctcactgcatcctcgacctctcaggctcaagcaatcctcccccttcagtctcctgagtagctgggactacaggcatatgccatgactcccggctaaatttttttaaaatgtatttttttgtagagacgaggtcttgctatgttgcccaggctagtctcaaactcccgggctcaagtggtcctcctaccttggcctcttaaaactgctgggattacaagagtgtgccactgcacctggccaggaattgattttttaaaactgccttattggaatatatttcacatatcataaaatttgtccatttaaaatgtgcagttttgtgggttttcgtgtattcacagatgatttcatgtgcaatcgtcatcacaatctaagcctagaacattttcagtgcccagaaaagaaacccataatgtgtgcagtcactccacattttccctacctgccctagctccagcccgaggcaaccactagtctactttctgtctctttatggatttgcctgttctggacgtttcatataaatggaatcaaataatacataatcttttgtttggcttctttcacttagcataatgttttcaaggttcatctgtgtggtagcatttatcagtacttcattcctttctatgccaaataatatttcattgtatgaacaggccactttttatctcttctttaatagatgcacactgatgtttctagtttttgttcactataaataatattgatatgaacattcatgtacaagtttttgtgtgcccatatatattcatttttctttgatataggggtggaattgctgggtcacataactgtgtttaatgttttaaggaactgccaagctattgttcaaagtggctgcattattttatattcccatcagaaatacatgagggttccaatttctccacatccttgttaatgcttgttatcgtatgtctttttaattttattttatttttagtgggtgtgaagtggtatttcattgtggttttgacttacattttcctgatggctaatgatgttgaccatctttttcgtgaacttactggacatctgtgtatctatgttggagatatgactattcggatcttttgctccttttgtaattgggtcattgtcttttaattaatagaatgtattatttctttacatattcagaatacaagtcccttatcaaatatgtgatttgcaaatattgcctcctgttttgtgggttatctttgcattttctttatgataccctttaaagcacaaaacatttttaaattttaatgaagttaatttatctacttttctattgttacttgtgcttttgttgtcgtacctaagaaaccattgcctatcccaaggtcatggagacttactgttctgttttcctctataagttttatattttatatttaggtctatgagccattttgaggtcagttttgtgtatggtgtgagggtaggcttctaactttatatggatagccagttgtctcagcacaattttttgaaagactattctttctttcactgaagtgtctgagaacctttgtcaaaaatcaattgaccacattgtgaggtcctcaagttttaatgttgtcactaacatattccacacttcaagctcttctggctttgactaagtccagtgagaacccactgctaattctagagtacgggctgtgaaatgaaatgtggtgtgtaatatacccacatggtgacattaggaaaatcttaggctatctccatttatgagttttcctattttgtaaaatgagctgaataatatctgctctcttagccgtgtggaattattgtggtgaatacatgaaataatatatgaagaaacacctaaacttatgaagccattgacaaatctgaggtactgttgtctgcattgagaagggattttgtaaacagattatgatttagtttagggtccattcactctcacaatcattgggagttgagttactgcatggtagaaaaagtatcccagttgccattgtaatatggggctcaatttaatccaaattttgactatttgatttacagaatggatatgtttgctttaccaaaaaagtgggctgaaatcttccttgttgaggcaaatgtgttttgagaaaactggtatcacaatcaccatcaccccaatatgtaaattcctagaaatttgggaacaggatctattcattttaggccaagtatttttcctagatctttcagagaatacagatttagctttccttttgaaaccagggaagttgaatcttgttttctactttgatgaatttccaaattcttgtaactctagtattcttatattccaaaagatacaataaaacaagttaaatactattctatatttcagaattttttctactacaaagaagttttccacagttttgctgtttcatgtgtcacttaaacaaagaattaacgatttgattggactttctcattaatttctattagttcaaatatggcagggtttattggttacttgcagttatgttctggtgtttctagttcccaggtttggtttggaagctagcagctcctggttatgatttttgctttcatttctgattcacatcttttgattcagaaatcattgtggctgatggaagtgctctgaggagggccaatctaaggatgcagaaaacaagttcaaactcttctttccacttttgtgccatcagtctcctccttggcccctaaactaacggcaagagtgagatgaagataattaggaatgatgtccagtggtgggtaattactgtctcctgcctttggaccacactggaaatggggcacttgacttctcaggatgaaatacagcttaaaattaggccttcctggccgggcgcggtggctcacgcctgtaatcccagcactttgggaggccgaggcaggcgggtcacgaggtcaggagattgaaaccatcctggccaacatgatgaaaccctgtctctactaaaaatacagaaattagctgggtgtggtggcgcatgcctataatcccagctaatcgggaggcagaggcaggagaatcgcttgaacccaggagtcggaggttacagtgagccgagatctcaggctaggctcctcaatactatggttttttctcacctcaagtacactcatgagcaaatatcacattagcccaccagtatgagaaactcagtcactttcacctcatctcatttttgacctcacccatctgctcagcacataccttctctacatctagagtcagttttctttcgcgtcttgaaatgcatcttctccccatcagtcttgcctgtagggagttgctgacccactttctcctattcctagggtaatactgctgcttctctctgccaatgactttctgatcctttacagtctgatgaaagagatattacaaaattgaataatgatgtgaatgtagaagcacaacaatcatatctggcctgcctagtcctgagatggaattcagcattgagggtcactcggcttcattaatgctcatatctgccaccaataatcagttgcagtcccatgtaagttgctactgggtgcacggtttaccttccctttctagaaatgcagttacgcgtaatcattccccagattagttaatgatgacataaatggattagctattttctcgagggcacttggttagcaacgcccaaagtctccctgctaagttttatggtgtaatagtgttacagtgttttgaggaatgggtggggtaaagaggacaaatattttttccttgtcatatatgtataaacattaaagggatttagttacatacatatactagaaattggactaggtgtctgtgaaatgttctttagcagtctgtaagtggtttttaagtattatttctaaaacctggctcttttaatttgacttgtattcaactgcaaaatgagatgttcagtgcagagtataaacatcattagatttcagacatgtgtgggcttaaaatctttagaaatatttggaactcttaggatggagcatgagtgaaggaaaaaaaatatctggccagttttcacaggtgaaattgatctagcatgcattttagaaactctcattttctcactttgcagtgctttattgaaataagttagccatccatagactttcagaatacagccttataattcctcttgtgaaaatgacacactgacttgatatatcacttcttattcgtacacagacggaaacactgaagtaagcttgggacaggataaccccaacgtgttggagacaggatattctatttctgggtgttgagaagagggttgctgcactgcacaaatccggaggctactattcactttgaattccgcaagaatggtagaccccttgagttgtgcctctctcaccccggcccaccattactgcactcttgaaattgcaccatcaaactgtgaaccctttagtttaagattctgaaccttgccatctttgaaaccattaccaaggagttgggagtttaaaagacaaatgtctactttacaagtttgcctagattcggcctcatggcaaaaacaaaagctgtttcatgccacggtgaataaatgtgaccttccattccaaggtcacaaattaaggtgatcttgagaaaggctgaaacatttttatacatgatgctaggttgatgttcttgttattgtttagactcaaaaggacttttctctataactaagaatatgtaattttgagtctgcatccaaattcgaaggggttagtggtactacataatgtggcataaccatcccatctcactccaaaggaaaaacattggaggagttaattccaatttgcccaaggctgaagtaactgaaacaaaacagagctttatataagctgatatttggcctgtggatgagggtacagggagaaaactgtatgcaagtgggctctacaccccgctgtgtaccactgaccaggtgcaaaaagaaatatgatgatatgagggtgctttgggttttattgccaaagacagctgtgatgaacattccagactctggggcaaaagttagacagagctgccagaggaacaatgaaagggattctaatacttcagtctgtatataaaactgagccaaggagaattgaggaacagcagacaatattaccgtaattcatctgatatgtttatatgtaatcttcactctgaaactctttcacaccaaagtcaaatacttgtggacctggctcaagtgaatgagagagagagagaatggcctggctcctgaggtctctgtctttggaggacaaaccagagtacgggacaatatttttaatgtttaatgtgttaatttaatatttaacatttttgatcaaatctttttaaactccaagaaaggcttttcagaaaaattaaaaatggaatcctttcataaagtgcttttggtgggaagtaatagcagtgatatagtgatacaactagaagctacatgtaatcctgctttagcatagtgacgtagtggaaaattatttggaccagaggagatcaattctacatattgattatccagatgggaatttgctatgggactaaaaaaatagctccgaggaacctcatgataaatcctcttttcttgaggtttctaagattatgaagcttgagtgctggacaaggaagcaagacactatcaaaaatggcaacacactgtggtgagtagagcaattaaattctttcttatgaatgaaatacaactgtaataaggcaataaaactgcctagcaaaaaatgccattgctaatgcctaaaactttgaaacttcacataaaggagttttacttccaatagtagcatacagaacatggccattcacgatgttgttgatgtcgctgttagtttttcagtaaagcaaaatcttcaaacaggtaaaataatttagagggagcaagggctaatggaggcagtggtttggggttcagggacttgaggaagtcttcccgggattgaaacaccaggtttttattgcttactagttgtatgttattgggcatttacttcaactatctacatctcaagttccctacctgcataatgaggaaaataacatttgttacctggcagaccaggtgcgatgctgctaaacatcctacaacacattagacagcccccacaacagtgaaaggtccatccccaaatcccactagtgtcaagattgagaacccctgggttagactgtggtgagaactaaatgagtgaaaacatgaaaagcccttgacaaatgcttggcatgtaataattactacataaatgtgaacgatcactattgctaacaaactctttttatctggaatgtccatagataattaaaactagaggttctaggaccagtcagcctgtgctggttacctgaggactttctagcatgaatcaaaactttgatgcatctacatcatcaaaataatagctttggaagctataacatgaggcttaactccagaatttttgaagctacttttaaatcctaactgggttccttgaaggctgcctcctgatgcaattttggatgggggaagaagaagggtagagaacattcttccgtggtacagagcaggagttgggggactttttttttttgtaaaggcctagatagtaattattttagcattgtgggccagacggtctctgctgcagcttctcaactctgctattgtagtgtgaaagcagccatagacaatacggatgcaaatggacgtggctgtgttcaaataaaactttacttacaaaaacagtcagatttagcatgagcgtcacagtttgctgacctctggcataaaggaaaaatcatggactttatattcagaggactgcaggtatgaaaaatatttgaatttctgtgagaatgtttcctcatttgcatacttttgatgaaaatatctgtaaacaatctggtacatagtagatgctcaataaatattagttttcttcttttaaggcatgaatagctacaagtactgaattaatggaatttcaatttgaaaatgacaacatacttgcggtatggttttcactttccccatgatgtcctgctgacttctgtcacaattataataaatgttactccttctgtaatgtttttcctaggctacactcaactgacttcaatcttatattcttggcatcaatatcacagccttttctttttgtgtttaatggtaactttgttagaagcagttccaaaatgaagaagcagaatggaaggggttgctcataattcattgaaaaacaataaactcctcccttcctttctcttattaattacacactttataaaacaaatgcttcacacccttccgtttgggctgggcacactgaatgaaaagaaatctacttaacctgccatgggtgtttgtctctatcacgtctttttcataaagtttctgaaaagtagcgatttctattaaataattttcaacaaatgtgtttggcatttgatgttgtggtcagagggtaaacaataacttttagcagatgaccattaatggagtgccaggaaagatggaggtgacgtgtttaagggaagggaagttatttctaatggaaagaggaaacctctactctatgactttaccttaatcactttcaatcttacatgttatttctcattaagtgacattccttttagttgttgtgccatgattcctgaaaagtgatgtactggaaaaatactgagttggacccctttttgggtttcagttactcaggtatagaagccatctgcttctgcaaagttctggaaaatgaacattgggtttctgctctttggtattccgtacagtgagtgaaatacacgtgattacgtcactgatagaacttaactgggaggtacaactggaaaatgttaagctttgttctgccttcatgacgcacccacaagtgatatctatgaaatatcttgccctgttgttgtcattctagaatatcaggagaagtgagtagattgatttttaaatatctttgatgtccagtgattcacatgtacgtttattcaaacacaatgaaagagacttgagtttagagaaattgaacatgtgagctatagccatgactagaaaaagagacttgtgctatcatttcattttagacatggttggcagttgtatcctccccaagaaggatatgagacaagaatggatggtcaaattgttgccagaaaacaccagtactgggtaggaagtgaaacagggacaactacgaagccagtaaagtgtgacttaccaagaccaccttgggcaactggagattaaccccattgggcaactctgggaaacagtacagaacattccagctaatagggaagaagcagagtatttatgtaacatctcccatcaggagctggttgaaagctgttgggggaaggtaggcattaacttccctttggaattagttggtcctgggaggggcagaaaaagttcccaggccagggagataggacctgtgagtgcaatatgggtatggccttgacagctgtaggcaggagctcttacactagaggagactacaatataaccattttgagctctcatggaggacagagagagctggcatcacagtcatccaatttttcagttccaatgacttgtgactaactgtggggctaaacagaatttgcatcggacagtgctttctgtactggccttggtcattcctgacttcagggtcacaatctacctacaagcactcatttgcaactgactgtaagtgggtctaagtttgagcaatggtaggcaaagttccctgaaaaagaaaacacgtgacatctagcgtgtcagaccaaaatgtatatttcctcatctagtgactcctaacttccatcatttcaactcattgtgaaattattattgtctttctggaacaatggtttgagaacttgaagcctctgcagtaaacttgacttttttaaagcttgagttaaggattatttggagaagtgtccctctctctccctaccccctttttttcctcccccctccgcccccatctctccctctttatacattatcattaaggtcaactatatttctataaacaaacctgacagatgttaccatctaaccttcctacctgggaaacagaatggtctgttgaggtttgtcaggatcggggtcagggttgtgggaagggagagggcagcctgccaggtaatggaaacactgcttgctttaattttattgccaagaacaaagccttcttattgtttaatagaacccttaaaggcaggcctcattggcatagttctaattttttcgagaccacaaacaagaggaattctttagggccacttcgtgaaaagcagaagaaaaaaatagtttattctgcaaaaattaaagcaatcctttgtttcagtagccagtgtctgatttcaggttggcatctgtatgtgtcctctctacaggggcatttgttggcattgtctgcatgggcacccactctttcattcagattaattggaggttatgcctgacatatgaaggaactggacagaaaccatctttctctggcaaatcatccctttggcagcaatactttcagataacatgctaaaagaagaaatgtttcgcaccaaaaacaaagaagcaaacactctcctcttgcaaaacctatttataaaactgggaaccacacacatcttcattcagtgcttattttgattctaccagcaaactaaaccttctatgcagtccttgcttctcagcagcaagttttacttctctctccatttaaagtataggtgaccaaagtttccggtttccagagatctttgcaacagtgttagtagctaaggaatgaaagtgagaggagatgaggtcattcttgttattccatgaatgaggaagatgctatcaatgtacagggatcatctatgaagcaaatcttagggatttgttgagtgcccacaatgtgcaaagcaccatgctaggacctgtggtagaaacagaacttggcctgctagaaagaatgacttcactagagaacaagcagcgaacatgccaagtgcacacataattaactgctaaaccatgggctacagaagttctagagctgtgtggtccaatatggccaccactagccacttgtggttttgagcacttgaaatatggttagtctgaattgagatgtgctgtgaatatgaaatgcatacattaatcatttttacattgattacatgttgacatgataacattttaaatatatcggggtcaaataaaatgtattagtacaattaattttacctgattatttttacttaaaaaatgtgattacttgaaaatttttcaattacatatgtggctcacattacacagtactttgattggatgatgtgactctggagagtttgagaaatgaggcaattactgtgtgagtagctgaggaaggtttcatgccaaatatgaaggagagactggtctttggagatcagagtaggcaagacagagttaggaaacccaggggtgaggaagatgagaaaaggcaccagggaagagaggcaaaagaacatttttgcaagacagaggaaattaaaattctgtttcaacaacatgcagggtacagtgggcatgcatcttgaattggttatctgggaatggggagacagaaataccgaagccagttatatcttactgccccttgtgaaaagccttttgggggccatttgcagagagctagccatgactgagctccatagagtctggctaaaacaaaacagcaaattgaggagtttaacttgggagtggggagttcttccttgacccccacctttttctaattgactccctttgtatcctggtcttagtgggccttcagcattgatctttaaagctatccatgcttacttgctttcctggagttttcttctgaaatggtagtggggctggtaaaagttacaatggcagtagaagggcaggcaggaaggacactggagagctgtacaataggggctttgacaaaaggacagtgaagagcaaagctaatctgatctggaagagaaaaggaaagatcacagcatttagatgtcttttggttgctaattttgaagttgtggtgagtttgtgagtgtgtgtgtgtgtttgggaatcatgagagactgatattgaaaatgttttcctgttaagtcattttcagacctaggttgattagccatcttacatgtgtggaattattatttataagtgttttcccaagcctgattcaaagtgactatctaactatttttttcttttgcaaaccagaaaagatagagaaggtatcctagagaataaaaggaaaggtacaggtttataataagggggaaggaaagacccacctcgatcgatctctattcagggctcagcaacactcctgatggacagctctctcatttttgacttccctttgtcaactccatcctcttagccctacctgggtggcagagccctcaggctgggagggagctccttgtgtgcactagcattactgatcctccagggatttgtggctactgaggtttgctgtcataaaaacacagtgctgtgtacagtcttctcaagaagggtcctttctgcccttcaaggtgtgagcttatcggacatgctgatctatgcaaatgagctagtgctacaaggaggacagaaggatgatgtagttggcctctagaggtgttccattcactcatcaatagtcaagtgctgcatgctaaacgcagcatactaggaagactgtcctatttacccaggagtccaaccaactaggagaaggaatagacacagacttacagaccatcaagatttttgttcaagaactgcatctatgtcaacaattcactatgtagtttcccttaagcttttaagttcaaattatgatctcattattctattcatacatctaataaattttatgaaaccaagaataatcactctcgggagtccttgaatcaatgtttgattaactcaagttgaatagactcaactccattaaacaatcaattctgtctatacattagctgattaagttcctacacacatatttttaaattgcggtaaaatttacatgcaaggaaatgcatagatcttaagggacagtttaatggattttgataaccgacagctcaatcaagacataaaacatttctatcaccctagaaagtaccctcgagccgctcttcaggtcaatcctcacccctatgaggaatcactgttcagattactcctgtaacactttaaactgcatttatcaatttaacacatttgatttactttataagcacttcaaatgctaacaggataaaattaaaatcctaacacgttataccttcccaagtccttaagtagctcttataaatctaataaactaaacttaaaaaatatgctgaaacccaggccgggcgtggtggctcacgcctgtaatcccagcactttgggaggccaaggtgggcagatcacgaggtcaggagatcgagaccatcctggccaacttggcgaaatcccggtctctactaaaaatacaaaaactagctgggcatggtggtgcacacttgtaatcccagctacttgggaggctgagacaggagaattgcttgaacccaggaggcagaggttgcagtgagccgagatcacgccaccgcactccagcctggcaacagagcaagactctgtctcaaaaaaaaaaaaaaaaaaaaaaaagaaaatgctgaaacctaaggttttttgaacattgcaatattgctttgaaacctaaactatcttacagatccaacttaaaataacagttctaaaagaaattacatgttaggctgggcgtggtcgctcatgcctgtaatcccagcactttgggaggccaaggcgggcagatcacttgaggtcaggagttcgtgaccaggctggccaacatggtgaaaccccatctctactaaagatacaaaaattagctgggcatggtggtgggtgcctgtgatcccagccactcaggaggctgagacaggagaatcacttgaaccccaggaggtagaggttgcagtgagccgagatgacaccagtgcactccagcctgggtgacagagcaagactccatctcaaaaaaaaaaaaaaaaattacgtgtttcaaattagcatttcaaagcaaatctgtcaaatttctgtaatatgtcatattatcttaaatgctatgaactattaacatacaaacaaatatttcagtcccaagttgtaatatatatatatttttaagttcagggtctctgtctctgtcactcaggctggagtccagtggtacaatcatagatcactgtaatctccaacttcttctgggttctagtgatcctcctgcttcagactcctgagtagctaggactacaggcaagaacctccactcacagttggttaattaattaattatttagtagagacagggtcttgctatgttgcccaggttggttctaaactcttggcctcaaacaatcctcccaccttggcctcccaaagtgctgagattacaggtgtgagtcactgcacccagtcataacccaaaatattgattttatgctacaggttgagtatcccttatcctaaatgcttagaaccagaagtgttttggattttggaatatttgcacatacataatgagatatcttggggataggacccaagtctgaccactaaattcacttacattccacatacaccttatacacataagcttgaaggtaattttatgcaatattttcaataattttgtgcatgaaacaaagtttgtgttaagtacttgtgtgtggaattttcctcttctcgcgtcatgtcagtgctgaaaaagttttggattttagagcatttcggattttggattttcaaattagggtggctcagccagtattatttagttcttcatctttatacatgaatctcaaacttcctgggaaggaggaaaaaaaggaatttacttatttactaaaggaaacaaatttatcatctcaaagaagttgaggttagagggtcaatggttaataataaaagatttcagaacgttcataagaactgaagactcactgattgtactggcactgcagatgtacacttgctgagcctttgttatggtgggtttaacagggtttccaattacctatctgataagatggttcttgtaatgagaattcccctgggaatctaactttctaatcacctggtttgggttcagtaacaactccagttacttattacttggttaaattcaacctatttctttactggctgattcttgttatatctggcttcaggccacgtatctgtggttatttgaatgatgtttatgtcaaaagactgttgggataattaaatcaggaagtgacagtaagagctggtcatggtcataactgcttgtagtgcatatctacataagtcctatcactttttctttctttacactacagtctatgtgttgctgtgaaactggaacagatctatgcaataatgctccccttccaacacctgcaaagatggacaaggcaccaccttcccaatcctatggaaattgacagaaggcttccttgaatgaacttatgacatctcaataccaagcttgccttgtcagagaattagaccactatatagttttcacgactttacatatatgaacttgatgttatatctagggaaaatacttttaaaagcatagtaaaagctctatcataaattcctaggccaagaagttacctcacttggttgtaaaaatctttgtgttgctcctcactgagagccttgtacattccatggtagcctcgggcattttaaatagctgaatttaaaatttcatatttctatttcaaacaaaaataaccagtactacaattgtcttcttgttaacggacattttatatgcatgactcaattattttgctgtggaatttcaaaattagaacaaagctcttcattttttcctacaacatttaatttagcaaattaaaaatagaagtcaaccgaatcaggtaaaaaatgatatgtctggcttctttcataatctgtaattattttatacacagagataatttcaacttgattgtcattggaagacaattttatgttcatttattgagaaaaataatttaaactagatattagacccagaagtaaaaggttggttcagtaacaaaatggtggattgattgttaggattattcttgtttctgaatgtcatgaatgggagcaataagtgaaccaaagcttttacttgagagttaccttctcacctgcaatcattccattcccctctgactctttcacctgaaaccatccagctaagaccatctcatataaaagttgagttagaaataacaatggccattttattttattttactttatttgagacagagtctggctctattgcccagtctggagtgcaatggcgtgatctcagctcactgcaacctctgcctcccaggttcaagcaattctcctgcctcagcctctcgagcagctgggattacaggcgcctgccaccatacccagctaatttttgtattttaaatagagatggggttttaccatgttggccgggctggtctcgaactcctgacctcaggtgatccacccactttggcctcccaaagtgctgggattacaggcgtgagccactgtgcctggccaacaatggctattttaaaaaatgtatcactacctgttcctattattctttatatcatgccagaaacatctctgctgctctagtcaatcacgcaagtaaatatttccaggtaaagaaggttgtgtgtggaatactgtaatggagacaggataaggaattcttgtattgtgtggagggagggagcacaataagatatatcagaaaaaagcacactttctctctaactttctaatgctcagcctttgggcctccaattaaggcctattgcttcacatttaagtattaaccttggaaatctgcactaccaaattcaaacattagagggtttgtcttcagaggcacgtacaagtgttcatactccaatctgagccactaggtaggattctgtatatgatgcaataggtcataccacccaaactagaaagatttgcagacgatgaaaggtttggataatgttttatataaagtttcaaaactgaaacttgggaatgtcattctaaaagtaataccagcttactaagccttatattcatttattcataagattaatctcattccaaaatactcaaagatttttgctgatatcttctcattactccttatgaatatgcccaagaaagaaacaggatccaatgcctgttatgaatcaaatttttctaagtcaagggcactgaatccaaagggagacattcaagtatgtgttagatactttaataattaaatttaacctctaccaagaaaaactacatttgcttcatgagttgtcaattttagtaaacttggtagagtaaactgtttcaactgtcttactattgcatatgaatagacattattcaaatgcaatagtaaaaacaaatcttctccagagatgataaatttctgtgcagaccaacagttcttttctcctttgtcatgggaatcctaagacgtgaacttgggaaatcaaccattattatagtggctcgtcataatccagtttctgaaagccaccatatttgcactatcacattatcataattctagagcctattacatggagagccagagctgactgtgggttgtatgatgtggtttaatgaggcccagaatctgactctaattataccttgaaagcattctcacagggggtcagatcgggtgggaatctgaccctcatctgcaagtgaaaatggattataactttggacattcatgtcggcccccagcaggatatacttcatccaagatcagacacacgttcacaagacacaaatagctcgtttggtgtttgcatgctggtcttcatccaatgactccggatgaagccattgccaagttttctacggagagagaatgctttggcattacaaaactgcacaacaaaattaaacaaatggttcatctttctttttaacccagtgatttttcattatttcaaagtttacaaatgaatgcttttagggcttggtgaattactggaaaagtcttctacagactcccatctgttttgccaagtgattttctacaatttcttacaaggtacatatcacccaagtaacacctcactctcatccttttcaatttacaaaactcatcatctgagcagaaatctaattaaacagccttaattcctccacaagaaccttgtcactttacatgacaactagcactggagaaactcagagaaagccgtatgagagcaaactttccattaaaataaaacaacaacaaagatagattaaaaacttagtgagaaaaataatggcaaaaagaattttaagaagtgattacaaacaaggcaagataaaccaaaggggccaatgctggaactttgaagtgatgttggattagaaaatgcccttctaggatgaccttgagcaagaatggtaaggactgctgagcctttatcctcttgaaaccattatggcaattggccaccctttcccagttgttcttggccatcatctttagagtcactggcacctatcatttccaaaacgaacatctattaagtgtcaaggtgttgtatttgctgtaaaagaacttgattattggaatgtgcagaaaatttggtacatatcagtgattccaagtgtttgcttagctaataaactgtgtcttctgatttttcaaagaaaatggaaagagaaatgtgatgaagagatacagtccttatctgacctagaaaagttaagttctacaggtgacccaaattttgatcatttctcataagcttgtctttcactacatatataattaactccaaacttgtctagtgtaactacaaactcatccattctaccttatttctctcctgaagaaaacaaaatagagtggttgaaaacccattagtttttacaatcctagacaaacatttcttaggagtctacctgaagttgctcttttttttttttttttttttttttgagacggagtctcgctctgtcccccaggctggagtgcagcagtgtgatctcagctcactgcaagctctgcctcccgggttcacgccattctcctgcctcagcctcccgagtagctgggactacaggcgcccgccaccatgcccggctaattttttgtatttttagtagagacagggtttcaccgtgttagccaggatggtctcgatctcctgacctcgtgatccacccacctgggcctcccaaagtgctgggattacaggcgtgagccaccgcacctggcctgaagttgctctttcaatgtctctgcctcctgagtcccaaactgtcttggccttcatactctgctcttgtgtgtgtgtgtgtgtgtgtgtgtgtgtgtgtgtgtgtgtgtgtgtgtgcgcgcgcgcacgcgtgtgttttaagagacagggtctcactctgtcacccaggctggagagcagttgcactccatgggtcactgtagcctcgacctcccaggctcaagcaatcctccagtcttggcctcctttgttactgggattacaggcgcacaccaccacgcctgtctagtttttttattttttgtagagacgaggtctcactgtattgcccaggctgttattgaatccttgggctcaagtaatcctcctgccttggccgcccaaagtatgctgggattacaggcatgagccacagcatgccattctctgttatccaccgttttaaaaatgtttggcacttacaatcaaaaagccattcatttgcttaccctcatttaaaaaacaagttatgaaaacaatgtggcaggggtggggagagttgggtggctgaaggggaaccttcaaactgttttccattctgaagaaaagcagaggtaaatccctgggaagagatgtggacttataaggatgtggcatttcctcatgggtcgtgggaaggaattcattgatttaatttacaacaattaggaggtgcctctgtgctgtgagttttttttagctccagctggcatgggaattattttcccggggaatgctcatacccaaatacaaggacaccttcaggaagaggaaaaggaagaagtaccatctaggaaccaaggatgtggaccaggaaattcttttccactgcactgatttaaaagaatagcatgctggtgcctaacaaactccatggcctttttggagtttcctagtgctgtgaaggtttcccttggacatgagattgttttgcatgacaatatccatattattttctcaataaccaaaaatgtcatttcctgaaaagagttggaaatgccagttgtcactgtgaaactcacacaggtctatgtgttccttgaaccctcactaaaccttcaaaaccaaagttcaaattcagatgcaacacgaaagcctttccagctctcaactctcccaaactagttcctacagatccttccttcttccatgctttccatttctccagaatgaactacttgctttgtgtacatacattcctcgtctttctatccccatgcctttatttgcctggcaagcagtgctgcttccataaactcaaatgttacctacccttgaaggcaggctcagatcttgcgctgcttccccagtccccagctagaaataatttcttgtttctctgaaagtttgaagtagataatccacaccttcttcatggtaattatggctttctactttattttgtgttataagtgctcttctgtcttagtgaagatagtaaacttcctgtgggcagggtcctttggcacctaacacagtgcaacacacacacagtgggtactccaaccgcactaccaaaatgaacaaactagcaagacactgtaacaaattaaagtaactgtccacaggcaaaaatgtacatcccctcccagaaatatttgtttagcaaacactgctcctagaccaacagtctctagaacagaaagtcatgttaagcaaaattatccaaaacatggaaaaaagagaaagagaagactgtgagcccttccaaagtcccacgagagcatattccatgaagtcagcctaagtcagggtcatctgactctccagactgggatgtaacagagtctgactttctatttactagtggttagggcttagactctgcgaagttagatgttaacttagagaaacccagtaatatgcaacttattttgtccaaatgtttcaggtttattgccctgtaggtcactaaccagttttgtatccaaattagctatgctagtctggcattcttttccccctactacccccttccccacatttatatgtatccgtttctggcatcctccttggaagcagctttatcatcttgctggttccttcattaagaagttaaaaaaatctttgatgtggactaattcattcattataggagaattgggtgttcaacttttgaaaattatactttcagaatactaataattaggaataaaaacaaacgtaaaaataagtactgtaagtatcattatttttgtactcataattttctttaatttttatctagaataaatttcccaaataccaaatttactcacccataaacatgtgcttccattcccaaggatttatacaaaaacaacagagaaaagaatgaatattctttattccttgtaaatgcaagtccactacaatcaattcagtaatagctttatttgaaaagcctgtattgcaactaaaatcatatctgatctattaaaataaaactaaaatctccctgtaaatttcttcaatttatctatcatttgaaattactgaacatcttagaatgtaattttacatcatgttaggatgaatagcgtcttgtaaattcaagccataataatattgcattagaagcaatgcatttgttctgaaatcacaacaggtcataatggaaaccagacattaatgctttaaggagtaactagctgaaattgaatgacataatcacccaatccataaagcatttataagatttaccataaagctcaggtaattttttttttaactgaagagaaataattctttcttactatcctaaacatcaaatgccatcacatcataaaaataaaatatggcacacagattattccattttgttcatccatttattcatataatacatattaactttaccctataataatgaaaacattatgcttgttcactattatttccaatgttgtttaatcaacaaggctcaacatgttccctggcaagaggcttgccaaaagagaatccagtctaagcagagggttcaaaaggtctggattctgcaacacactgctgccttcacactctcaacttcatctcaacatgatgaaacactgattctaccctgacaatcatgtagcttttaaagcaagagggtctactaagtgaaccaataagctcactggacaatcctaatctgctctctcacctatgttttactctgattcctccctttctttccttttgtatgcctttccctcttccacctatcataacctccatcagcacctcaaatgatgaacagctggagtagatggcttaggtaggagatgagaacatccctaatttctgtctccctggatattatccttggaaaacacaacaaatttggagttggaaaaagttgctaactcatgtgtttctcttagtaaccagttttacatttctgatcacaaggggagcacttgtaagtaaaagcacagactttacaaacacaaagtattttaagccttccaccaaagcaccagtatttgcatagtagacatgcttttacactgataggatctttctgaaagcaatctttgctaatttctgctatgctgaggaatgtatcactgacaaacatcattgtgttgcataaataagctgacacctcaatacttagggtactgaaaaataatagttgtgaaatctataagaactggctcaagtcctgactcttccacaaagcttcagaaaaattgtattcgcatttttttctcttttaatccccccttctcaaaccatactccatctaatctaagataccagcaactgtctcatctatattttgtgtgccagtaggaacaaacaaatgttgcccattaaactgtctcaccattcatttaagttgcagctcaatttcagcaatattagtcttcaaaaaaatgctaatcttagaatccataaatgcaatattctactagctgagcacctgattggctactctactgttctttaaatatgttgttatatgtgtgtacactgttctctaacatattgtaatctttattattatttgctacattgtgcatctactgacagttataggcacataggaggctataaacttataattactgcgtagacgatcaaagggacttgaaggaattcttattgcaaaaatggagttactgtcaaaatttttaaatgcctgctcaaaataatttgcttctccaactttagatattttaggggagctgaacttgcaggcattcaaatagtgttcaaaatttgccatttggagagtcatcatgcaaattcatctaaaacaaattccctgagctcctactgtgtgaaaatcattgcatcagagtctgtgagatacaaagacgaattagatttgattcccatcctctaagacctcacattctggttggaaaaatggaactggtacatgaaagaatgataaagccatgagaagattattactattcttgcattgctataaagaaatacctgatactgggtaatttacaaagaaaaggggtttaattggttcacgggtgctgcagggctacacaggaagcatggcaccaggcatgtgctcggcttctgatgaggcctcaggaagcttttacacatggtagaaggcaaagccagaactggcacgtcacatggcgaaattaggagcaagagaaagagtgtgtatgggaggggggcgggcggtgggggaggagtgtcatacacttttaaacaaccagatcttgtgagaactcactcattatcatggaatcagcaccaagccatgagggatctgcccccatgacccaaacacctcccaccaagccccacctccagcattggggattacaattcgacatgagattggggcggggacatctctcctttctctgaatcacatacacggtatcataaaatgttacgtgattcagagaaaggagcgatgactctggtccagggaaccagagaaacgttcacaactgaagtgccccttgacttaggacttggaggatacacaagaagcattctgacaaatagacatgggttagaggaatgggcctaccagtcagagggaactgcttggttaagggccagaaggcttaaaagtgtaatgaatgataattgtttagtttcagttcatggggtggggtggtaaaaaagacagtttgggagaagatggaagaggaatttgaaaatcacataaaggaagtggcatctattttttccttattcagtgtagtcattgcaggttctgctgttgttgcaattgtggtttatttcatggaaacatatctgacaactaagatgcattaatatacacctgcagtgcattaaactgtgtccgcaaaaaggtatgttcaagtcctaacccttggtacctgtaaatgggaccttatttgaaaacagaatctttgttttttcttttttgagacaaggtctcactctgtcgcctaggctggagtgcagtggtgcaatctcagctcactgcagcctcgatttcccaggcttgggtgatcctcccacctcagcctcccaagtaactgggaccacaggtgtgtgctcccacgcctggctaattttttgtattttttaatagagatgggtttttgccatgttgcccaggctggtctcctgagctcaagcgatcctcctgccttagcctcccaaagtgctgggattacagggtgtgagccaccatgcctggcctgaaaatagagtcttcgcagatgtaatcaagttaaagtgaggtaaggctggagtagggtgggctctttataacaataaggaaatttggacacatattcagagacacaccaggagaatgtgataacggaggaagggtttagagcgctgtagctgaaagccaaggaactccaagaattgcctgcaactaccagaaaatgggaagaggcaaggaaggatcctcccctagaacctttgtagggagcatggccctgccaaaatcttgatttcagacttctagtctccaaaactgagagaataaattagtcttgtttcatactttcccagtttgtggtaatttgttatggtagccatagtacactaatacaataccttttttttgagacggagtctccctctgttgcccagactggagtgcagtggtgcgatctcagctcactgcaagctccgcctcccgggttcatgccattctcctgcctccgcctctggagtagctgggactacaggtgcatgccaccacgcccagctaattttttgtatttttagtagagacggggtttcactgtgttagccaggatggtctcgatctcctgacctcgtgatctgcctgcctcggcctcccaaagtgctggggttacaggcgtgagccaccacgcccggcctacaataccttttttgactgttctttgtaagggcaattaaaatctccaacattaggactgctatgtaatgctagatcaggaagagctataatgggaatgggaagcagccctggatgggaaagactctctgaagttctaattccttttaatttcctccatcttttattttggcttttgcaaaatatttaattttaagaaagattcttgttttaaaattataaagcatgaggatatcaaaaccttgatctggcagttttcatatgaaacataccatacagaaatacagagatactcacttcaacatgttgacaggtttggatgagtttagccaaaagggtctccagttctgtgttcctcttaataaggttggtgaggttactctctaagttttgctgttcaaaaaaaaaaaaaaaagaggaaaaatattattctgcatacttttatacttcagatacacaaaattactcattctcaggaaaaactgatacatttttcagaaaccttagtgaaatcgacataatttcaagtatttatagatttaaactggattttcaaaagttgcatttaaaagaaccttttagacacgctcagactttattctttttgttcctgcttcttgcactaactcagggatacttaacagaataattagttataggttatctctaggtcacgacctaggaagaaaggaggtaattggatttctatccctttacttgaatcagagctggcaataacataaggaatatattcccacatcaaatcaactaccattggatttttcagatttatccttttatgggcaggctgaggctaatcccttggaggaaggtttgaattgtttagctcttgctgacaataaggtcatttatagacatttatgataagtcctcatcacacacacatttggtcagttgtagtggagttgactctgtatccactgggttccacatacctggattcaaccaactgcagatcaaaaatatttggaaaaaaatggatgactgcatctgtactgaacatgtacagacttttttctcctcattattccctaaaccatagaatataactactatttacatagtatttacattgtaataagtaatataagttatctagagagaatttaaggtatgcaggaggatgtgattaggttatatgcaaataacaggccattttatatcagggacttgagcatccatgattttagtatctatgagagaccctgaaattaatcctttatggataccaacaaacaattgtacattttattgttcatgcttctattctttgtccatcaatgccagatcaaatttctttgaacactgtatttaccactcattatcctgcataagactctagaattattccctattcctttagagcatcaaacttaaagttctctggaatgactatttaatcctattttcaaacacaatagctctctgttctgggtaagactcactaagatttctctgttccttctcattcacatgctcttgattgccaggggtgtccaatcttttggcttccctgggccatgctggaagaagaactgtcttgggccacacataaaataactaacactaatgacagctgatgagctaaaaaaaaaaatcacaaaacaatctcataatgttttaagaaagtttatgaatttgtgttgggctgcattcaaagcgcttctgggctgcaggtggccttgcaggccacgtgttggacaagcttgatttacaccattcattcatttacttatgtgttcctaccattcattcatttacttatgtgttcatacaacaagtacttattaagcttctacaatatgccagactctgaaagagacagtggggaaatcaaataaaaatattaatatctattccctgtccacaaggaaatggatgactgtacaaactgggagaaagatgctgcaaacaagagaagggaaagagttgatggctgctggttaaaggtttccaagagggccaagtcttgcagctgaggcttgaaggatgtccaggggttttttgttgcacaacagtggaaacttcttggaaagaaagaagtgagcatgtggaagaatcttccatgggcagggaatagaacaatgtcgtatgccaacatcagagaggttgagagggcaaaagattagggaaactgtgttttagcatatagacagttccacaagtatggcaaagatacggaacaacaggaaatttcatggaaaagaaaacagacctcaaatttataatgccatccaagaaagaggatttagaaagagtttgagggattttgaaaactaacaagttcataaaggtgttaatttcattatgctgtaaaatttatttatgaaaattttagctcattctacttccctaaattttttatttagaaaagtatattaaggaaaagaaccactttcatctaaggcttaaaatgcatatgtcaaaagcagaactttctggttatttttaaaacaagttaaacttattaatctggtgtttatcctattgactgattttaaaattttttaatgaatgcattttcatttctagtaggttctttatcacatctcccttttcttattgaatttctctctgttcctattacaaaaacacgattctcttctccataatctcaaaacaactaaacttacttattcttaagctcttttgagaaaaggcaattctgtatttccctgtgcttgttgactatttctcaaggatctgattttatctttgtcttgtaatttttgtctgacagctcatacgatgtaaactttgttccctgtgctgtgatttggggattgacatagcccagccagataagaagcatattctgaggttagggcgtgaggttcttttcccaaagaagacgctcccacaaggcactcgtgtgcaacagaggcacagatcctagtttgactcagtgcctctgcttccttccatgagagttctgtgtctggcttcaattccagagaagatgtcaggttccctttgagtccagtctatgcatgggggtcttggcctccaggtgtacaaggctcttgccacatgtgatgttcacttccctatgtgtccactgaagtcaccattgccccatgtcatctccacttcttgggagtagcccagtgtcagtcttctctcaccactctacactttctttcatttccggtccttggaggctttccacatatgtttatgcttggttatgtattcactaaaatacattttaaaatattttatctgtaattctcatgtgttcaaacttcagaggaaggctttgtgcacatttcatctggactggaaaaccaacaagaaaccttcaattctgtcttggaatcactcaaaacatttcaaatatgacaattttaaaggggaagaataactttttcacttaaagaatgggatacaagaggctgaagagtcagagaatgaactagacacagtgatttatgtacaacttgatcttatgcttgcatcaaagaaaaacttgcttttaacaacaacaacaacaacaacaaaagccaaagttttttttttttattgtttggattaaatgaatcgcaactgctaatcactttatggtcagagactagaggatgattttgaagcatcccattcttcaatgtccttgatatagacataaccattataacgtatatttgtcaacttttttggtatgttaatactaggggatacttttctttttggctgacccttcacagcaggaaatttctagggaaatacatcatctaactgtttacagttcaattgtcataagtatgacttttctaaagttagtcagcaaaagagggccaaagaaatgcaatccaacacattgagattttacaaacatctgcttgcttccccctccctttattaagtatacatcatgcatcaaatctgtttttaatcaactaatacatagactaaagcctgtggtttaaacacattgacctatccagatcctttggggttattcaaatttaaatagtacaagtgttactgaagtctgcaaagaattaccgagtcagttagaagcataataaagggaaattaagctgggagagagacttgtttccaagtggtaccaaaggggctgacaacacctttgaagggaacctgggtaatgggaagataacaaaatccagtccttaatgagccatgcacccataagcttccactacagggacttctctgaagattttctggaaattaactctatcactaacatcctgtgtggtagtggtcagcagtctccataatctcttgattttgattgtgacttgtgcaaaacagagatcatacttttccatataaaagtcatgggattaagtagatatcagtttctatactgccctatggatatctaaaaaaattctacagagcacaagaaaaattggttttagtttcctgttctcaccttgaaaacatcaatatattgacatctccttactcaaggcaagttttgtagaaatccaaggagtcagtgaccacatatgaagagggaggagaccgggactaccatcccagctggactctcttcggcaaatgactggatgtgtcttgggctcagttttcccatccataatgtatggataatgataaatctacctatctatactattgttaagatcaaatgagaaaatgaacacattcaccagagaactacatgaatgtctgttgaaattatgaattagaagatggaacatttagtttggacacagttccagacactagaagggcccaaccctgtgcctctgggaggcaccattctccagcttgctcatggctttttcctgcaagcacctgtgccttttcaccccagggccttacctggcttcaggcaaggcaggtgctggggagagtaagaagaagctgatgttcctaggagcagccctcaagtggcaattactggcaattggtggatatgcagcccagctttttcacctcctgggtggaaccactctgagcctctgtctacaaaatctcccacagggcgcaattgggaggcagcacatgggtccacagcaacaacctgctcattaaccctctttcctcttcaatctcttccctgtttgcatcccctctccctccaggtgcttcctggatcacctcccaattcaaattctgagtcagagtctgcttctgggagaactcatctacgatcatctccatagaccacctaacccatttttgcgtatgcctttctgtgaggaagagccaaatcagaaaatattttattgctttagaaagacatttgcaaatacaagaggttttctctctttccccatctttcctctttctgcttttcctagaggtcacatatcctccaaattccaggctgtagatcagcagtatcaatagaaacctaatgtgagccacaaatgtgagtcacatttcaaatttttctagtagtcacattaaaaaaaatagaaccaagaaaagttaattttaataaaattgtcatttccacctgcaatcaatatttgaaaactgatgagatattttatattttgttctttctttttactaagtctttggaatctgatatgttttacacttatgacacatctcaactcaaaccagccccatttcaaacacttgggagctacatctggctggtggctacctcactggtctagaacagggggtggcaaacttgctataaaagatcgtgtagtaaatatttcaggctttattggccatatgttcttggacacaatgactcaattctgctgctgttttagcatgaaagcagccatagataacatgtaaacgagtggataggactgtgttcaatgaaactttatttaccaaaacaagtggtgagtgagatttgacccacaactgttgtttgccacgcccccagcctagaaggtaaaactcaaaatgataatattgtctgggccactgataaacatctgcttctgttaaacactaacatttgtcccaaactttttgtgtaagtctgaaatagatgccactcaatgaacctctaggaagaattctttctgtacaagatgctaagagcactttcacttatgggcagaaagcttagcttgacagaacccacaataatctgaagaaaattaaacagcattttgactcgtagatattctaatttaaggagcataatggttaagtacacagaacctggtgccagtctgcctggtttgaagtcctagctctgagaccttcaacaagttcttaacctctgtgcctcagtttcctcatggggctgtcaagatgattagaggaggagatacatggaagccctaggaagagtacctggctcacgatgtgttgtatcggtgcttgttaaataaaataaaaaacttgtttttcaagtttcgagtttagactgatttttaaaaaaagcttaatttgtaacacttataccacaaccaaattaaaagcatgcccatacagttaataaaatatttaaaccaccaccaaattaaaagcatgcccacacatttcataaatgatttgttctgtagattttcaatttagtagtacatagctacaagaatatatttccccctaagattacattttccaaaaacactgaatcctatttgctcagctttctcatgatgtgattattgtcagaattcccatctggactgcgggtccctgttttagactaagtgtacatatttctaaaatgttgtgcaatgtcctaaatctcaatgaatgctaatgctactatttgttgtcatctcgtccatgaagcccttctcatctgttagtttgaatgggcaactccctttcctttcgtggtcagtattactcatacctcttttcctctactttccccactcctgtgctgtgctcctgccattgtgaacaagctgttttatggatccaggcttgtttctgggtctgagcatgggcgcagtctcttccctttgcctggaatgcatgtgtgtagcagaaaattctaccagcaaaaagagagtataataaagccacaggatgtattgagtacttgctgtatacccatcattgcttagtcccttcccaccgtacacccttaaatatgcaatgatatttccaattagcatggaaaactgaatattcaccggacaacccttctgaaatccaatgtagtaaatcaactgattagttaatttaacaactagtgtagatagttaagacaatgtcttctctcagctttgctaaacaacagaagtcttccatgctttcaggcttttctcattggtaccgttgagtctgaccccaagaagagggccttgagagtttagaagaatttttgaggaatgttatataacactgtccagagcacaggattcctgtgaaggcaaatataacattatcaaacaaatttttccaaaccgggatttataaaaatagagagatgctatagcaattatcactaacacatcaacttcaagttccatctaaacccaaagtcaagttgctcccagccttaattcattaccttttccccaagtgattttttcatagtgctcttattctgtgaggtttacgacttggtggcattcaatactaccctcccaccactaccaccaaagaaaagaaatacaaataattcaaaatggtccttataaaaggcaaggatacctgtgggcagatttagtttcttaatattaagccaaggattgggtataggtcaaatttgtggaaggcaaagttataaaacatgtgttgcttaaagaatgaggcttccttacatactttatgcaaaaagggtgattaatttttcttataatttttatttttaatgcacacattttggatgcatcttcacagagccacagtcaacctccttcatgttaggtagtttttagtaaggcttatttgagctgataattgaacaattcatgttgggacagctgattttacaccaatctcaatatgagcctttaggcatggatagggacaccagcagagaatagtaaatccaacttaacagatgagctttgtacttctacatacagtgatacccaatcaaatagcaagggaagcagacaaatgcccctaattttagcctttggagacctgaacctaagagtcaggttgcagggaattaatgacttgtcattgagcactactattaaaatgtatgcttgaaacaggagatttcagtaattccttttgggtttgcccaggacttaaagaatgcttgctcttattccgaagtcaatacttcagaatgtctttaaagtacaatattaggtctggatacctttcaaggcaaacacagatctggcttgtttcattccataatattcagagtgacattcagcaactgtattcggagccctggcacccaacaccaccactccagcgtgatcaggatatggacacgtcaagtgccacgacccatatattttcttctaagaaactttaatcacaatagttaatatgaaaacacacccatattaacacatgccacttgtataaaagcataaattctttatatgtaactaaattttaaagatgttttaattgcactgcaggaggctgagactatcttcaggtttgactcgacagaccgcaaatacatgtaatttaggttgttttaattttttaatgcatttttttcattggttataatagctaccatttccaaatgccctggcaagacaggccgccgagggaacttcaaaaacctaataaaatacaatctgcatataaatttaagtctagtattccatggactacaatttaagtcattttgatatgtgatacagtgtttaccttgtcaggttttatttgaaatttctatattaacaccacagaatctgttccatatatttataaattccatcattaggagttcagtgtttatttttctaacctggtagtcaataacatacagagaacaacttttaaatactgtgtatggtctagaagagcttttattttaatggagataaataggtatcttagtatagttctattcatttagttataattttagcagatccaatgacgactagttatttccaggtattagagatgtgaatggccttttttattcactcctcctccccagccccatttctgcctataataagagaggtgagcaaatgaccaataaatacatttgttggttttgagaatggatatcacatgaagctatattactagaatcctttcaaattctctaacttaaaaacaatgatctcagttgcaaaatttatgcctgcagaaaaatgcttctaagaataagtctataacttttatcagcaggacataaaggaagcattttgtaagactataacacagctagaagagctgtggatggtccaattgggcaactctctggcagccctctctgctcatttgcccttgttcaacttctgaatccttctcaacacagtactctgggctgccatagcaatatcaaaagaggccacaggcagggcactgtggttcatgcctgtaatcccaacactttgggatgccaaggcgggaggattgctttaaaccaggagttcaagaccagcctgggcaacatagtgagacccccatctctacaaaaacttttttaaaaattaaaaattaatattaagccaaggattgggtacaggtcaaatttgtagactacagctggtacacatctgtaatcccagttactcaggaggctgaggagggaggattgcttgagcctgggagttcaacacttcagtgagttatgattgcaccactggactccagcctgggggacagaaagaggccctgtcttttaaaataaataaataaataaaacaaaagaggcaatctacttgccagttaagaattacatggtgaggaggatattgtagaacagactaatagtagttaattatttttgttcaagtgaaaactttcaaatcaggagatattcaatgtcctaaaccagaggttggcaaactatggttggtccactggtcaaaccttgcgtgccgcctgtttttgtgtggcttgttagctaagaatggtttttttttttttgagacagagtttcactcttattgcccaggctggagtgcaatggggcgatctcagctcactgcaacctccgcttcctgggttcaagcgattctcctgcctcagcctcccgagtagctgggattacaggcatgtgccaccaccatgcccagctaattttcgtattttttagcagagaaggggtttctccatgttgctcaggctggtctcgaattcccaacctcaggtgatccacccgcctcagcctcccaaagtgctgggattacaggtgtgagccaccgtgcccgccctcatttttgcatttttaaataattttttttaaaatgaaaagaataacattttatgacacatgaaaagtatacaaaactcacatttctgtagccataaagtattgtttactgttgctttcacagtacaatgagaaagttgaggacttgtacctacaaagaccaaaatatctgctatctggccatttgcagaaaattgttttccttatttaaaaaacaaccttctctttttaataatccaagaaagaaagaaagaaaggaaagaaagaaagaaagaaagaaagaaagaaagaaagaaagaaagaaagaaaaagaaagaaagaaaagaaagaaagaaagaaagaaagaaagaaagaaagaaagaaagagaaagaaaagaaatccctggtatccatgtggatggtaaaaaaaaaaaaacagtccatgtagtttttaattaatttatacataacattttttttctgttgctccaagccattttaaaatttcaatataattcaattaacttaacattttcaacacctactatgggagtgtaggaggatgcctcaaattccaatccttcaggtactcaaaattctaaagactctttttgttaaccaccaaaataaattttaactcagaaaaaaattatagataagatgtcttaaattatggataaaatgcaatgattgaataaattcctgttttatttgtgtcttttgtccaggaaagcaggagcttcaaactgaggaagagtaagaaatgacaatcttcaattgtatcaaggttgctatagcaaaaacatggtcaaaagtgagtaaggaaggcacagcatgaggattagttagttcctaccactctgcaaataaatatataaagcattgagttttaagtgccgactggataaggaattactcattgattgctatcttcctcaattctattatcctggtctttttttttttcctcaatcataaaatacaccttaaaaggcaggcagggagggtgtagagcactagataattaatgtctataaaatcccctgatactgatggatgtcatacatgttgtctgtataggccccttcaagctttacttcctccatcactcagggattgaataattttgatcttatcccctttcttccatcttaagtagatgataacattgccagatactcactaatgaacatgttctggtcttcctacttcaacagggttttaactgataccatcaaacatttttaccagacctgaatgtcaaattagtctcatagtggatgcttagccttggatggatgaaaatacatttttgtttttcagatactgtaggaaaaccaaatctttttctaagccagcaccacgcatcctgcaggtacttcatgtcagttaaactcaatatattaaacatatttgaagctaaaatagttgaaagtctttgatctaataattttgaatagataagtatgatttcctttttttctataggaatttatcttctgaattttttaggttttagaggaaaatgcccttttctggaccagctgctgaaaatgattattaaaattcaatacatgatcagctttgttcttgaattgtggcattcaaaggaaaggttcgtagctttcacaatactcatatccccacatgtgtggtacaaaaaaatatttaaggccaagggaggtcacactctttggctcaaaaaaatagattaaaattccattccatccaaagtgggtacgatctgtcaggaatttacaaaatcaatattatgtaagagaattccccatttgggacatcctacagaatcaaagaagaatatgaaagcatgccattgtttttcagctctgaaccttcaaaaacagacccttgcctaagttttgaagtttgaatctcaaattcttaaaattcattgcatcctttgtccctgacttcatcatctttactcagccatttcctcaacctttagtaggaccgacactgcctttgtctattcaagatgatttcgactgagttgaaagaaatgtggaaatcatggaaggaaagaagatgaggagtgtctactaggggagtagttcccattctggcctacacatggcaatcacctggatctatcctcccttcccaaccggagagtataaataacttcgcctgagtgaggtccagggagcaggatttgtgaaagctacccaggagattccaatgtgcatccaagttcgagaaccattgctcaaaatggagaaacaggttctgtgatacagtgaaggaaaatcaataatttattcaatttactacttttatactttaggatttattcagaataaaaatatatttgtaatgcagcttatatgtatataacaagtacaggaataaaattatatatagatgtatgtagaagtataaatttatgtgattttatcatagaaaatcccagcaactttattaaaacagtgcttagcggggaaacactgattgttgctgttaaggaatttagaggactttttatacttgaaaatataagggaatgctttcttgcattcgagtattcccaatgcctaaaaagagctactgaatggtcacctcaatttctaatttgccaaagcatttgtatacaaatttggtctgttgaccttaacagtagttactttcaccagaaacacaacagaagtgtactacagatgtttatcattcaacaatattttaacacatttaacttaaatatttaggaaaaacattaaaaaaattctgacgacaaaagaatagatttacagctctattcactttcaaacgtcaactcaggcaagagcattgccctgaagccttgtgtagtctaaaaggtaaattgcaaaatattcccaatatttggaaaccaaagtgataaagtattctgaggctgggcatggtgacacacacctgtcccagcactttgggaggccaaggctggaggatcacttgaatccaggagtttgagaccagcctgggcaacatagggagaccctgtctcaaaaaaaaaaaaaaattaaaaattagctgggcgtggtggcatgcacctatagtcccagcaactccggaggatgaggcaggaggatcgcctgagttcaggaggtcgaggctgcagtgagccatgatcgtgccactgcactccagcctgggcaacagagggagacactgcctcaaacaaaacaaaacaaaaacaaagaaaaccacacctagtattctgcttctttgattgatggccacttgcctggggaaaaaaaaaatagattttctagaaagtgatttaatttgctgtgttttacaaaaaatatttactaaggcattttcccaatagcattcatttgtttatacatgactaaagacaatttatgggtcactgtattttggaagtgaactagctctcagttccctgaactatatttgagtttacatatacaacgtgttgctaaagcggaagtcaaataataaatgttactttcaaaaacttttaaaaaccaagccatttgcttttaatccagtgagagaaaactgtccaatactcagaagtggaaggagacttgccagttataacaattacaaattgcaaagtctcatcttttctgtagaatctagaaggtagaccaggagttctcaaaatgtagcttggcccaaccacagcagtcacctggggagccggttaaaaatacaaattgttgggcaccttcccctgggaaaacagaaagagaggaaaagctaagtaggaagtaagcaattgctctgcttctctccccactttccctttcttgtggacattttgttatcttattacttactaaggctttgtaatcaggtcccattcttgggcctttcccgagttccttcagtctctactgcggaacaggaagcagaactgaagagagagctagagaaggtgtaagggggttatgagccaatgtcatgccacacagaaggttcaggcatggatgctgcacctcgatcagctgtgctttttaacccatctgactggcagttctaaattgctttttctaataaaaatgaagatagaactcagatgttcacaacgtgccctctctcacacgcaaaaaaacagtcatgctgaagttgctcccagtgtattcttgattacttataaacgtcgttcttaaaaaaaaaaattaagtggtattgaaagggggagagggcaaccagccagcagaggatccagactcatctgtttatgatgaaaaaataatgcccccccaaccattggttggactcagtgtacctcttcaaaattcaaaattcagcttgacagaaaatatataaagctgaaaacaaacatgttaaactttgctctcaggactttttagtgtgacttttataatttgatttccaaatgtctgtgaccttcgtctatcactgtgataggacactctggggaggcagtgtcacatgacatcagacagcttaataattaaatggtgatagtaaatcacaaagaggacttttggccttccacaactgttatctttctccagtgtgctgtttttatttgaataaagtgtcactgatacaggtaatgaacaaattctcaaatcgaatgcatttactataattaaaggcagactttagcactgtgcaattttgactgcaagtgagtttcccaccagaacatgttctatccaaacaattataataaaacagtggcttcatatgtacatattccatcagcaatggcattctttttcacagctttaactccatcctctgtcctgacacgattcagattttgatctcagatctcaactctgacctaagctttagtctctcactatcagttcaataccaactttcagctttgctggtcccctgttattttaaactcaactgtcttaaatgcatcatctgttcctttgaaatttctccccaccttccctttatttatttatttatttatttttattgagacagtgtctcactttgtcacccaggctggagtactgcggtgtgatctcagctcactgcagccttgacctcccaggttcaagaaatcctcctgcctcagcctccccaagtagctgggactataggcatgtgccaccacgccagtctgatttttgcatttttggtagagacgaggtttcgccatgttgcccaggctggtcttgaactcctgggctcaagcaatccacccaccttggcctcccaaagtgctaggattacaggcatgagccaccatgcccggcctcgatctttacaaaagatattactatgctcttcatgtcttctatctaatcactctctaaagattttggggagttgtttttttaaaagactccttgacttcagttttcccttttcttcccaaggtttccattctaacaatcttccatgaatcactggttttcattcctctaatttttgtccagttgggtccacacatggccgtcaacgtaatctttccagtaagcttacatcactctcaaaactccaaaatttttcaactcttaaaggatgaagttcaaactcctgagttggcgtgcaaactcatcaaaactataggtttaaaactttcccagtagaaggcagctataattaccaccaccctgcaaaatgaacattcaacttcagcaaaactggattcctttttggccaataaattgtgccatgtctactgctccttccaagctctcagttacgtctttctactaaactagtattttgttgttgttcccccacaacatcttaacatctagcgggttggctgtgcaaatagaggcactgatgaatgtttgctcaataacagtacataaataatattaatgcaaccaaagatttcctgactataacagaagtcatatgaagccaaatcttaattccatttcaaaattggatagagtttaatcatatggttctgaagacatcaatgcatatttaagacatcaagccatagttcactgtattataaaaacattttgattaaattagtttcagaaattgctctctggccaaggagctatctgcttcacaatggaccatgcaataaatcttagactacatgtgctgacaggtataagatgatttattgaaatgtaggatgaggaattgtgaagcattactaagaaatacacactttcttccaatgtaacattattttactttacaaaagtaatttaggaggaaactgtactatcaagataatagcaaacacttcccaaacatctctaattctacatattaaaaataatccaagaatgaaatcattagatcgtgcggctggctctagatcagacagatgacttaataatgatccatctccctataacaaagctcacctctgttaataatcagagaatttatactatctgtgaccttcaatattgcttcaatcatgtgctagccctaggatttttaatcttttatttgatttttctttgcaatgttattctattttacataatgatgactaaagagattgagacttcactataaattgagattcttaaaataaagctgcttctgaattcaaaacaacaagaacaaaaccaaacaaacaaaaaaagaaactgagccacatatgtaactatctcttcatgattaaagttgattataatgatctcctgaattttaccatttaactggttttctgagaattaacactatttacagctacagtttcctcaatagccaaaaaaaaatcaaaccctctcttctcttttcttttctttctgttctttgagacagagtctcactctgtcagccaggctggagtacagtggtgtggttacagttcactgcagcctccacctccctggctcaagtgatccttccacctcagcctcctgagtagctgggaccacaggtaggtgccaccatgcctggctaatttttgtggaagacacctgggctcggtgcggtgtttcacacctgtaatcctagcctaggcgggcagatggcttgaggtcaggagttcaagaccagcctggccaacatggtgaaaccccatctctactaaaaatataaaagttagctggctgtggttgcacatgcctgtgatcccagctactcaggaggctgaggcacaagaatcgcttgaaccttggaggcagaggttgcagtgagccaagattgtgctactgcactccagactgggtgacacagtgagactccatctcaaaaaagaaaaagaaaaaaggatcgtggaagacttctggatactgcctgcaggcctttagatagtatatcccagggcctttacaatgtttcaagatctgggaaatttccatattcttcctaacaccaagtacttaacaaggctaaagaattctgcctgtgactttaatctgtttcctgggctgttagtattccacacaaataattctagttgttacctgcagaacgtcctgaggttcatagtaagaagtttgcgactaaactagtttaattataaagcctgatgcattgcttcaaagtgagagtcagtctgtctttgattgtctgagacccaatatttcatccgtggagtcacagatcacaaaggtctattattccaatttagatggttccatctaagttggatgtgcactgtgcataatgaggatctcatccaaatagtcaatttggtgaaaattaaatcgactagtgccaatgttctctagtaacacatactgaggttctccctgcctcttcttacagttagacaatttagggcagaaaagactcatgaattcccttaaaaggaaagcatccttaggacaagacccaggttgctctccctccccattggattcaaagcaccgaacacagtatttgctgcatagtagtctcaacaaatatttgctaaagaaatgggcaggtagatgggtgagtaggtggataacggttcctacagagtttgagaaaacaatttggcactttggtttcaaatcctgggaatgaattgagagtgcagagtgctctcaaatttcagagctatgcgggtgctgcctgggagttgaaagtttttccagttctcttgaatgggcactcaggttctcttgagatctgtctggaagagtccagttacttgtcatactgacattctacggaaggtaccaaatgcaataggtctaagctatctccttctctgctaaaaaacacaattctctcccatacatgagccgaaaagaaaggcctcactctcagggctacctctactctttgcctggaaagatgctgtcacatgttagcaggtgaaattagcagacacttacttatttttggattacaggtaaacagaaatcaccagttcaggtgccagtaataggtccccctgccctcccaccaccccccagtaaatcacagctggtgactacaacttctccatatctgaaatcactaactttaaaatgaatatctgaataaaatattattcaatgtactccgaggcaggctttgtgcacaccatctcttttgatattacatataattgatatatcatatatcaattacatatatcaagactgaaaaacacaaggctgttgattgacaagcattttctttcctccagtactgaagtacgatagaggttttttaaatgaaaactctactaaagtagtttccagttctttgcactttgtagtagagaaaaagtatttcctaacacataaggctggaattgtagtttagcatccatttcaagcagctctctagaaatgtaaaaaggaaattgcaaaaatgagttcaaatcacaaaatataaaaatcccaagtgtgaattttctgaacaacaatgtgcaattaagaaacaaatagaggaagggtgggagggtgggggcttcaagggataagcaccttacgctgaagtctttggggacccccattgctaggcatctccactggattttccaggactctggttcatttatttctagacagctattttaccatacttaagagtcaaatgatgggagttttacccccattaacggaacttagtgtggacagcgttctaatggcatagaatggaatttggcaaaatcaacggccatttaaaatggttaacaaacctggataatatcaattaaatcattcatagaattttaacctaaattaaacattaccaatgtacatataagaagcatgttaaaacaaaacaaaacatccctcaactctatacatcacaagtattaatgtgtttcgcagactttttaaggctgggatgaatccaacttgaccatgtgtaggctgtctttggcaatcatatgattttccaaaacaattataaaaataaaagaaacatttgctcattgctactagtgtatatagtgtctccatagggtaatttgtgttgctggactaaatgctctgaacctttaaaaaaaacttatagttcacgacttagcaaggtctgccagttgtaagaaatgtggaagtcataatgaggactggaaggggaacttaagacccaattaatgtggtaattaacgtcagaaatagtgtctaaacaaaaaggtgaagaaaaaaggggtggacttgaacctttactgttctaaatactttctttttttattatcattttacatgtttagaatgaaaagcaaaatgtaaaaaatgaccatagatttaatatactagccagatttactgggtagtaacttactaatgacaaaggtatctttgtgctaatcttagtgtcttcccatccctgactaggatcaataaatgtttgctgaattgaattggagtacacactgacattaggttggcaggagtaacggaacattacaaagatatggcaatcaggtcacattagaaggcaacatcataattatatttgagtttacttttattttggatgaaaaaaagaatttctaatgcaattccattccagttcattatgtggaagtcttaattcaatgactacataccaaacacataataattcttcctcatgacacattccctggtatataagtgctcacaataatatccacgtaacaagggctacatacactgaaccaatttgaagtgtgttaggtataggtcagctttgaaagatcaaatattgaccatgagataaatctcaacacccttgacaatattcaactttggaacaataattttcacagccacacaagtacagcactgggaatgtactcaggctctcctatcaacgatggtcctatcattctccttaagttactcttgggtttatctgattccaaaacacttggtcattctcctattcctgctagaaaggtgggctacagtgaggtaacaactcatttgtttagagctggataaagtggcttctttttccacagtcctccttgtttggcagtagaaataatagtaggagtcataatagtaacaatgagaatagcagcagtttagtagtagcagcagctgtagtagtagcagtaacaatagcagctaccatttattgaacacatactacatgcccagtattctgcatattctatctctagtcctcttaataatgtgataaggaatgtatgattaccctgatttctagtgatggagagatgaactcagagctgggtgtggtggctcacacctgtaatccaagcactttggggggctgaggcgggtggatcacctgaaatcaggagtttgagaccagcctggccaacatggtgaaacgcggtctctactaaaaatataaaaattagctgggcgtggtggtgtgcatctgtaatcccagccacttgggaggctgaagcaggagaatcactggaacccgggaagcaaaggctgcagtgagctgagattatgccattgcactccagcctgggtgacagagcgagactctgtttttttaaaaaaaaaaattagccaggtgtgttggcatgcacctgtaatcccagctactagggaggctgaggcaggagaatcgcttgaacccaggaggtggaggttgcagtgagctgagatcgtgccactgcactccagcctgggcaacagagtgagattctgtctcaaaaatacaaacaaacaaacaaaatgtactcaggctgtttcccagggttacacgactagtgatgccagcgctggaactccaaaccagttccatttgatttcaaagcctgttctccccacacaccatttgacttctggagcaaatttatgtcttgcttcttatggcatcgttctttaaaaagtcaactcatttcattcattttttttttcatcccttgtaacatctccagaaaatgcctgttatgattgttgcactggtttaacagattgagatgccaaagacttagtgcatcaaagggaaagttgggatttcccaggttacacttaagggagaaaaaaaaaagtgaaatgtgttatctaagtgatactggttagaaccaaagagatttgaaatcttagtaaacactaaatgcacaatgtggaaggcctcttttgaggaggggaaaaaaaagcatgcttggaatttcttaccaggacttaattaaaataccttaatttgggaaatgtttttctacaatgaattgaaatccttaccagaaggcttttcagaagaagggaaatattgctacattttaatatatagctcactctaaataaaaccagctctgagtcattgacctaatttagtttcacaaacagtattaggactgcatctaatttaacagtagaaatatatacagtattccatgtcagcatccctttaataccacaaggttctcccaaactcttattatgggataattcttatctagctctctaccaattatagggagatttatagcctggcgaaagttttgattcaaatttgtaaggaaaggctaatagatgagctcagatcaggtgaaaatgttgctgtcctatatagtagaaatgcaacataattatgaactctaatttgtggaaacataggctatttcctttcaaagctaagtgttttttgtttgtttgtttgttttgttttgtttttcctgagactgagtctcgctgtctcacctaggctgaagtgcagtggtgtgatctcggctcactgcaacctccacctaccaggttcaagtgattctcctgtctcagcctacctagtagctgggactacaggcacaggcacataccaccatgctgggtaatttttgtatttttagtagagacgaggtttccccacgttgaccaggctggtctcgaactcctgacctcaggtgattcgcccaccttggcctcccaaagtgctgagattacaggcatgagccaccacacccggcttcaaagctaagttttaaattacatgtgtacaccttgagttacttcagaatttcaacaagaaaaaatacctggatagaagtgtttttgtaaaacccaaagtaaagaacattacgggaaatttcggcctttctttcgttaagtgtgggatcttgaacccagatgaacgagactttcaacatattgaaggttatcatgatccaggatgacaaactctgaaggtatttttgggagcctgtgtcttttgtcctgcctaattgacataagaagataaaacattgttcttcacccttttcccactctacaatcatactttcctttagcacatccagtaacccctttgcctgcaaaaaggatgaaagaaaaaattgtaccaatactcaggtcagaaaattaaaagggagggaaacattcctggtaaacaccttcaaaatggtttgtttgcttgtggtatgatgattgcttctgaatgaaggagaaggagaaggagcaggaggaggaggaggaggcggaaacatacctatttgaaagcccaataacaagctggtggtttgttttattgcttttttaacacttttatttatcagttcatagtagtcatgattctcttgcttattttatcttcgttttttttctcctttagctctatgcagcagtgttggctgctgcagtagatgaataatagatttgaataagctacaagacatagtttagattttcactgcttttttttttaggatattgccaatgtattttaaatggaactcttacacaatagaacatcctacagggatttcctatggtagtttaagactttacaagacaaatggctgggccccatgaggttgcctccttcatcctgccatgggcattttgggcatgcctgaaatgttctagcattacactctctgattgttgccttttactgcatggagtttattatttagaaaaaaaagtttttaatattttaaggtaaaaattatttcctgtgcaacaacagcaaaaacacacacaaacaatatttagaagctgtaaaatgaagaacagttgattcaattttgaaagaacgaaagatgttctgaaatgctttggtttggttccatgaaaattctttgaatttcagccatttataaatcatcgttcaataagtcgctggcatttaatgaccacatgatagatttatatatttttatatatcttctttatagctgttttctcaatgatactgtgaaacaaacaaacctatttttatagcactttttttttatgcctgttgcctgtcctataaagacaatctcaagtgcagaacttccctggataaagatcagttcaatcttcagcagttgtcttatcacctaacactccctgtcagaagaaacccttggtattaactcatatcactcatcttctagaacactccttgggaacactttatttcataaaatcccttagggctatataactctcaacagtactagaaaatgactccccactgagactcaagaatcaaggattaagccagtagtgaagttttactagggtggagtgagcaaacttaggtgttgctgtcctcacatatgtgcgagagataaaatcatcctccagtatgttcctccctcttgcatttctcctaatcatagacacttccttgaagaagacagaacatgcagcctaggctatgttatgccaaagggtagaataatagtaatggtactacagggaataatttgtcatcattgaaagttttgggggccaggtgcagtggttcacgcctataatcccagcactttgggaggttgaagtgggaagatcgcttgagcccagaagtttgagatcagcccaggcaagacggcaaaaaccccatctctacaaaaaaatacaaaaatcagctgggcatggtggcacatgcctgtagttccagctactctggaggctgagccggggaggtcgaggctgcagtgagccatgattgcactactgcactctagcctgggagacagagcaagatgttgtctcaaaaaagaaagaaggaggccgggcacagtggcttatgcctgtaatcccagcgctttgggaggccaaggcgggcggatcacctgaggtcgggagtttgagaccagcctgaccaacatggagaaaccctgtctctactaaaaatacaaaattagccaggcatggtggcacgtgcctgtaatcctagctactcgggaaggctgagacaggagatcacttgaacccaggaagcagaggttgcggtgagccgagatcacatcattgcactccagcctgggaaacaagagtgagactctgtctcaaaaaaaaaaaaaaaaaaaaaaggaaggaaagaagggagggtaaagaaaggaagagaaagaaagaaggaaggaaagagaaaagaaaagaaaaaaagaaaagaaaaaagaaaagaaaagaaaagaaaaaactaatgaacaaaccaggcattctactcaatcctttaaagcacaatctcatatattctcaaataagccatgaaaagcagtcattgctgaacccactttataatttgggaactcaaatttaaagatgttcagaaacctccccagagtcaagcttatctgaggcagagagaaaattcaaattaaggttggtaggaccgcaaatcacctctaaccaagtatgattaaggaaaccttaataatgccaggaggattactgcagaaagcttcagagaaaaacagttcactgcaaccacatttgccagtaccttctaaaagttgtaaggccatgatcacacataccatagaactaggcaaaaagagaaaaaatagcatgacttaagtgtacaattatgaaaatgaactgttgttattatgcatattttaattagtatgggaagccctcataaattatgatcactattatttatgtggccaaattgattactggattattttaatctaccactgtgtgttccatgtcccctctcaaagctccctctccatgaggctcctctccatgcagttattatctctatgatacccctctctatgatgttattctctatgatttccctctatggtgccctctctataaggcccctttcaataacttcagttcaatgatggcatcatacagagggatgtcaatttgtgaaaaacaaattgattttgtttttccatctctagtgtttatcccctcagggaaatcattgattgaacaccattttataatcgtaaataagacagttttgttttttcaggacatgaagcacttttattgaatgtgttatttagataaaaaagggaagaggtagagtgactttctctgaaaaacatagatacgaagtaattgccaaatagagataaattaatctccaaggaaaatgaccagatccagtggctttttaacatttcaggaaccctatttttatgagtgtactttggaagaaaggctatacaaacagtgaaaaatacccaaagtttcataagtaccaaacacataactctccacattaattgtgatggctttctttccacttcttcagccttagtccatgctgtttcccaaggactcgtaggaagcatctctagctattagatataattcatattcaaatttactcagatgtattcaaaagaaatctgagataaagtatctccccatgagtcatcagcacagtaaggaagaattaagagattttcaactgattcctttactgggtgaaaagaaaatcagatctccatttttcttagctgatttttttttcttgcttgctttggtggtctgatcacgctgtctcattttctgactttctagctgaaaaaatttcttggataggaatattattgtctgggttattactttagtaaaacacatatactgtgattattactttaaatttggtaaataccatcaaaatgcagacctctcataaagacacagataatgaaaatttctgcgctctagactatgagtacctatgctaagatatttgccttaacttacataaagataattattatttaacctctacagaagttgggtatgttatagacactgcttcaaacaggaaaactgcatctagtagaaggaagatcacttgttgaaggttagtctatctgtggcctagcatatgggtttctactaaccaactgtgagatctaaaccagaggttggcaaactatggcccatgggccaaatccggccagtcacctatttttatagagcttcattggcagcctgccacatccatttgtttctgaattgcctatggctgcttttgagcagttcccacagaaaccatatggcctgcaatgccagaaagatttagtagctagtcctttacggtgtttgctgacttctgcctttatgaattaatctgaccctcagtttactcattgtaactgaggaattggaaaagaataaactttttccaccaagtttgcacattagaatcacttggggtagttttggggaaaccccaatgcctgagctgcaccccagaagatcttgtcccattgggctgggcttctgcccaaggtaatccctgtgcagccaggttgagaaccactggactagatatgcgtgatggcccttcgagctcagcgctttcatgacatgaacttcttgtgaaataagtagtaccttccagcaggaacaaatgcttggaaattatgactgaataaattcagcctcagcaatgaagactcacatctgatttatgctattccaagtctctgacttgaggagtttagaatccacagttttgcaaggataaagacgcaatgctatataaatataaatggttcctttggaagaccaacttaaaatagactaacagatttaatgagttaacttttgatctatggaaataattcacttttaataatatcacaattaaaactattatacatcaaatataagccatttgggcgaaagtctcagctgccagcctgttctctgcagactccccacttggaggaaagcctcaggctctcctgtctctgacacagacggctacacctggaaggtagtcctgaaaataagctgcaaacactaggaaatctaggggatagcagataatatcaaatacacctaaatcatgttttgggaagggattaaagaatatttcataagcctttggaggtttaaatactgttgaaacagcctgaaggctggcatgtgcgggcccagactgctcagagttgggctgggggcatgggtgagagaagcccgctgtgcaaagaactctggggctgcttccaggctgccaggctgccaggctgccactcagggcatctgcagatggcgggaggggagttctgcaatgtctcagctctctacatctcaaagtagatttggtttaggggtcacacaaacaagtaaatgtctgtaagagtaaaactgagcatttctcttatgtcattaacaaagatgctttgcttcgactcagggtatctccgctttggcaccaatgacatttggggctggatgactatctgtctggggggctgttctgtgcattcaggatgtttagcagcatccgtggccttgacccattgtgcgccagtggcagccccttcctctcccaagtttcgaaaactaagcaattgtatattgctaagtttaccctatggtcctcatgataccttaccatcctgtctcaaagtggaattaaactctattctgaggcaatagggaagaaaatacacacacacaaaatatatacagtcgtcccgaggtacctgtaggggattcgttccaggacccctatgaataccaaaatccacagatgctcaggtcccttatataaaatggcatagtatttgcatataacctatgtatatcctcccatatactttatctctagattaattataatacctaatacaatgtaaaagcttagtaaatagttgttacattgtattgtttagagattttttaaaagtctatacatgttcagtacaaacaaatgtaaccatttattgtttttgaatattttcagtcctcgggtggtagaatacacagatgtgaaatccacagatacggagggccgattgtatatgtacatggtattattttatcctatcctttgtgaatcacaaatatttgatcactgctgcctgaattaaagttttaaaaattcaaatggtctctttataagactttcttgaaagaaatcattgagaagaaacttgtagattcagaaaggtgtgcagagacctgaaaggcattattttgcttgactatgtatttaaaatttgaaagaatggctggtgggctaggattttcctttttttttaatctgatgggcaacttctacctacacaatacagactgtaatctaattaaatcattacagcctttttcaactggtttcaacaactatttactactgataaaataccttgtagcttttcagaatgctcttattgttgaaaaatgagtaatcagatataaaagaacacaaaatacagccactgggcttgagaaattgaaacactattggggagggaagacttatgcccaaagtaggtttatttttacatttttaacgttttagagacagggtctttctctgtcattcaggctggagtgtagtggtgtgatcacggctcactgtagcctccaactctgggctcaagcaatcctcctgcttcagcttccagagtaactgggaccataggcgtgtgccatcatgcctggaatttttttttatttttatttttttgtagagacaaggtttcactatgttgcccaggctggtgttgaactcctgggctcaagcgattctcctgcctcagcctcccaaagttctgggattacaaacgtaagccactgtacatggtattactttatcctatcctttgtgaatccggcccaaagaatatgaaataatacacaaacagcatgcaattatgaaggagtggtaaaaaaaaaaaaaatagggaatgtcggagatcagataattttattaaaagttaaattagagtagtcctccatgagatttgagttgatcctttaagaataatcaagagttggtagaggaagagctggaaggactgaggattcacttacataaactgtattgtttgactttgtataagaacatatacagtcattcctcaatatctacaggggattggtttcaagaccctcctacagataccaaaaatccatggatgctcaactctctgatataaaatggtataatatttgcatataacctacccatatcctgcaatactttaaatcatctctaggttacttataataatacaataattattaataattaataatacaataaatagtcgttatacttttttatttgtgtttttatcttttttaattgtttttttttcaaatatttttgatttacgattggttgaatcctcagatgcagaacccacaaatatggagggccaactgcattgtccatataactacagaaaaggcttaaaatttagaataacggggtaaagatagaggcattcaaggaataacaatagtgatggaaagaggaaccactatcctttgtccagggcttcctaggggacaagcattatggagttattactgaattattacctctgttttactgatgaggaattgaggcttgaaaagttagttttgttttttttcccttaagttcgcacaattctaaaatggcaacgccaggacacaagttgaaatcagactctaaacctgtctcagatctgctgaatcttataaatggtggctcatgatgtaatcccagtacttttggaggcctaggcgggcagatcacctgatgtcaggagttcgagatcagcctggccaacctggcgaaaccccgtctctactaaaaatacaaaaattagccgggcgtggtggcgcatgcctgtaatcccagctactcgggagcctgaggcaggagaattgcttgaatgcaggaggtggaggttgcagtgagccgagatcacgccactggactccagcctgggctatgcagcgagactctatctaaaaaaaaaaaaagaaataaaaaaaatatatatatatatgtatacacacacacatatatatacgtatgaaccctgagtggctttgtgcacaaccatgtttgagatatctttgttttagaaaccaatttaaatctacaattctgactgattagcgatcctagaaagaggaatggataacagatcaaaaagttttattattgactaacacatggtgatcatttttatatgtatccacgctttggcatgaataactaaatatgaatattaactcgttttggtctcttaagaaatttgaaatgttgaactcatagaccaagactataaatttacatttttagccagggtaagtaaataatcacatttcaagtgatgaaatgattttagggatcatcagagattcattcatttatgttaacacttaggtacagagaaactattgagtattggataattcaatattgctgtaagtaaataaaatgattccatatggatttccatatttcaactttgtatttttacttctttatttatattagagtggaaactagctcatcctcaatcatagtcaccacttcaaagggaacttctttgctcagtccagggagcctgtgtgtcaaaagtgaaggcaaaaatacttgctctctccatactcaaactctctctctttctttctcgctaattttttaagggtggtatgtttggaccatagttgtttctgctttaatcataggtgacgattagtcaagggcaaaatggggtccctgggtctgagctccaaaacgtagtcatctgactacagttatgcttttgaattttccatggcctcatgttctgcattgttaaagatggttcctatttacccagctgctcccacccactaaatgctaggctagacacttggacctatattatctcatttaatcctcccaagatccctaatgagcaggtattatcattcccatatttttgcaggagatacgtggttgttccaaggatcaaataatacttgaaagtgctttgcaaactgtcaatctggagatttacaaatgctagttattattcttggtaatagctagctcttggtgtttgatcaacaaacacccttgaaccacatctcaaaacaacttaaagcagcatcttgacagattactccaccttcctgtactaccactcagccctgacctacgaggcagttttctagaggtatggaagcagccctatggccttgcctaatatgttatcagatgaacgttttattgatacataatatttgtacatatttatggggtacatgtgatattttgttacatgcatagaatctgtaatgatcaagtcagggtatttagaatgaaagagctactggaaccagttaacaagctggacactataaataagtgaggcccttgtttgctgggaccctctagagcttaaatcagcaatccagaggcaaaaatagcatctccctccaagctccttaagtgaagtgcatacggcttccccatgtctcctagatctttcagactcactcacacaggccatactcagtgtgtgagtctaaaagcctgcccatttcactcttcttggctttgaatctgaccatgtcaaccaagagtgactgagctctaaacagctgtgtcaagggtcaaagaagggggaaataaacactctaccaggtcaggatattcatcctaacacctaagttggtaaaaattccataacagataaagcaaacccaccagctggcttggttaacacaatagcacttccgcaagtttgctcccataatatcttcctagggatggatcctttcagagtggaaatgacataaactgcttgtgagcctggatatttatctgacctattagccctgttcaggaaggaaatggagacctctgaggaaagcacgtgagaagggctagcagtccagcccgcgaacagtagacctttcataagaaagcatccagccggcttttttcatggattggagtcttcatattttgcccttacttgcaattccaaatgactgaacagtggaatttgcaattccaaatgactgaatgtcactgttctctgtaaatgttgctttttattgaaatgtatttttacttcagcttttggaattaggcaatttccagatatcaacaccgaagtcagtggttttttattattattcacattaaaaattatctcattgattgagctccatggagctcttttcatatcctgtctatatattcttattacatgttataatgagctctagaccatggaagcaacgacttatctttgtttttcatttctgcattcccagaatttactcagtgtttatctcatagtagctacataaaatattccctgagtaaacaaataaggttttttctttcttttttttttaaaagcaggatctgataaagcagatagggaaaagaatatttataaaggcacaaaaggaatagaagctgctcatgatttccatattgtttcagtaataagaacctagtctatcccaatgtaaataaaaataaaaaccatattttccggattttccccctcaataaatagcaaaagagatataagggaggaggcagacgatgataccgctattctaggcaccctgcacaactggcacagaagagagcacagagaacaaaacaccccagggcccctacagtggaggagttggaagctgccttcttgtacagctccttcacttcagcgctttcctcctcctccagccccagtcgataccgaagttccttcctcttcctattctaagagagacagctgctaacacacagcccagggccaacttgcttcatcatttactcacataccaaaggcaaccctacaaaaaaaaaaaaagaaagctagccccctgagctcgtctgactagtctaggcttactgtgtatcatgtcacccatcttttcctcatctgtctagatgtgtataaatgtgacagccatagtataaaccaatgccagcttttcttttcttggaaacagctgtaggtgctctgatggcacctgtggtgctgatccaatcagattaaccagaaacatgaaagagccgctcccctccacccctgccacccgcatccccagacttcaaattgggccttgtttttaaagccatttctttcaattcaccactcactgcttcttaaaagtccatttcactacttagcttggtttagaaaggacaaatcaaagtttccacccaattataattcccttgagagttgttcaaagtttcccatgtcagccagaaacacatatcaaccctataaccactgagtaatttatgatactgtcaagaaatccaccattggattacaccaatgaaggttttattgtaacagtaaatgcccagataaaataatacctcgtgtacatccaacacttactatgtgccagtcaccatgctcggcactttacaagcattttcctttttgatgcgacatgcaaaatgtgttttcctttgtcagcttaaagtccatacctcatgggtacgcaacaacgttgtgtcatacccaaaagtccagaatataaagtgattaagttttaaatggatttttacaattgcatttgtatcagatttttccagaatgtttatgccacatactgaaaataaattaaatctttagccacattcagtttctcagactactcatgcccactttatggcaatgtcaaaaaatttaccagtctaagaataatctatatattaagacattcaggaaaacaataatcctaagaagggaattagtgagcccattaagttgcaaccacaattcctttgtttcctcattgacatcactgtcctaactctgctttcttttgcagtgtccccgaggttgtctgggtccatgtacatgaacacagctccaggcatgaagtctggcccttcaagatggccaaatctacactggctcagctatagaaaatgtcagcatgggggcatcttctaggcaacttattttggtggccctggaggcatcattgcaaagccacatctctgcaataattcccagacagcatggtaaggcatcatcctacacccatgatgctggtttattgccaggccaagcaggcgtttaaaaattaccgtaaaatcattgtgtttactcctgaaaacctcagaagagacctcagaaatttcagaaccactcaaaaggcaatcctgcctgtgctggctggcactgttaaccgctgtaggaagtagcaggaaagacacaaaactggacagctgggaactgtgctctagtcctagttcagagtcactaacccactaggtcattgcggaaaacttcttttactactctcagccctactttcctcatctgcagaatgaggatggaatgacatgagctccaaggttgcttctggctctaaaacattattttggtttatagtgggcattcggaggtttgaacagcattctccttattgtgaatcaaaaagccagaagaaataaccatgcattgtccccactgtgtcttactgcactagaaaagcaggaaaagaatcacatttgtgtctgtacctaagagccaatcagcaacgacatctcctatttcttcctagttttaaggggcaggaccttgaatctcacaattttacatgtttctgttgacagggtggtggtttttgacctgtgatactacttctttctgccaattaaaagagagaccacaaaatctaaagtaatgtgaatgtctcttcccccttttatttcttccatgaacacagtaaccctatccattcttatattctcacatgaaatttatttcagaaaatatacattaacctctctctcttaaaaaaaaaaaaaaaacacttcactattactctatagaaaatggtaaaaatggcctaaacccttaaccttgcatttaaagactttcaagaccttccctccaggtgactcttccaacatcctctttcctggctccccatttggcaccctgtgctctagttaggattgtctaaaattccaaagctgtcttgcctattcctaccgacaggtctctgctggtctcactcctgcagagcacctcactcttctttgatgcataatccacagatctgtcaaagcagcttaaatcccaccaccctgaagcaaggtttattgtctactcaaaagcagattcatctcttcctcctccgaatcccaaaacactcgtctaatgcatcaattctgcacatgtccatcaacaagtgtttattaattgtcacgtctctgccctttggcaggtgctttagaaacaaaactacaaaacacattaaagcaacaatatatactcttatctcacatacacataatacaagacagtggttaaaaaatatttggcagtcagtctacatccaatgtccatacacttaaccattacacattctgcctcctagtttctaacagtcgttctgacatgtgttgcaggctttctgtaggccaggcacaatgctaaggcacatgaaacactttattttgctctcccaattttctgtgaaagtaagtactatacattagccctgttttatagacgagtaaaatatagcacaagaacgttaacaaggtgcccaagaattacgtttacacagccacatgatgaagaggtaccatgtgtacttgtttgtgcatttttcgaactctctgagcttaccaagaatgattccaacaataataaatcactaggcaataatacattgctctctgcaggtgaaggagttgagagaggactcatccagaaaatagacaggtgaggaggaggaaaaggaagctgccttgagtttcccattaagaacatatgcctggagatgctttcttttattccatctatcataaatatccttgtaccaaactaacaaaattaaaatatagttttaatacattttacaaatatttggaaatcttattttaatcacatggaaactattaaaaaatatacatttcaacacattgtatacacgtttggaaatatcagactatatctcataaatatgtgcaattattaagtgtccaactaaagataaaaggaaaaaaatacatatctatattgcagactaaacaaatgctgccataaaattagtacaaacagaattgcatattggagtcagttggaactggtgaaactccataaaattacaacattttagaagacatgtgtctgagttattcacataccacatggtgaaacatcatatagtctgtctgtattttagattaaaatcaactgggaattactgtgaacaagtttgaaaaactatatagggttacacaaagaacatcatacgtggtaaaaagttaaaaaggaataactgataacagggattttacagacatctagtaaattcaatattgttttctaatacaaggcttggaaatggtaggtgcagtgatcccttttctgggaagcctttctccatctctcaggactggggtcagtacctttgctttgggcacaatgtgcttcctgccaccatcaacagagaaagtatttagtagctgttggaatgccctactagactataagctccatgaaggcagggactgttactgttcatattaccttaattaattaaacacatattaattttttatgacctctcaaaaaacctatattaactttcattgtgggtttttttttttttcttttgagacagggtcttgctctgtcacccaggttggagcatagtggtgtaatcactgctcactgcagccctgatctcccaggctcaatgatcctctcacctcagcctccagagtaactggaaccacaggtacatgccaccatacccagttgaatttttatttttatttttagtagagacagggtcttgctatgttgtccaagctggtctcaaacgaccaagctcaagcaatgctcctttttggcctcccaaagtgctgggattacaggtgtgagcccccatgcccagccatatcgttcttaataacataggttcaaaaggcctaaagcaagcaaaatgacagaactatgaagaggacttgaaaatttcactctcggcaaaaaaaagctagaagcattccctttgaaaactggcacaagacaaggatgccctctctcaccactcctattcaacacagtattggaaattctggccagggcaatcaggcaagagaaagaaatgatgggtattcgaataggagagaggaagtcaaatagtttctatttgcatatgacatgactgtatatttagaaaaccccatcatctcggccccaaagctccttaagctgataagcaacttcagcaaagtctcaggatacaaaatcaatgtacaaaaatcatgagcattcctatataccaataatcgacaagcagagagccaaatcatgagtgaactcccattcacaattgctacaaagagaataaaatacctaggaatacaacttacaagggacgtgaaggacctcttcaaggagaactacaaacaactgctcaaggaaataagagaggacacaaacaaatggaaaaaaaatccatgctcatggatagaagaatcagtatcgtgaaaatggccatactgcccaaagtaatttatagattcaatgctatccccatcaagctaccattgactttcttcacagaattagaaaagctactttaaatttaacgtggaaccaaaaaagagcccatatagccaagacaatcctaagcaaatcgaacaaagctggaggcatcacactacctgacttcaaactatacgaggctacagtaaccaaaaacagcagggtactggtaccaaaacagatatatagaccaatggaacagaacagagaccttggaaataacaccacacatctacaaccatctgatctttgacaaacctgacaaaaacaagcaatggagaaaggattccctatttaataaatggtgttgggaaaactggctagccatatgcagaaaacagaaactgaaccccttcattacatcttatacaaaaattaactcacgatggattaaagacttaaatgtaaaaccccaaaccataaaaaccctagaagaaaacctaggcaataccattcaggacataggcatgggcaaggatctcatgactaaaacaccaaaagcaatggcaacaaaagccaaaattgacaaatgggatctaattaaactaaagagcttctgcacagcaaaagaaactaccatcagagtgaacagacaacctacagaatgggagaaaaattttacaatctacccatctgacaaagggctaatatccagaatctacaaagaacttaaacaaatttacaagaaaaaatcaaacaaccccatcaaaaagtgggcaaaggatatgaacagacacttctcaaaagaagacatttatgcagccaacaaacatatgaagaaaaaaagctcatcatcactggtcattaggaaaatgcaaatcaaaaccacaatgagataccatctcaagccagttagaatggcgattattaaaaagtcaggaaacaacagatgctggcgaggctgtggagaaataggaatgtttttacactgttggtggttgtaaattagttcaaccattgtggaagacagtgtggcaattcctcaaaaatctagaaccagaaataccatttgatccagcaatcccattaccgggtagatacccaaaggattatagagcattctgctataaagacacatgcacacatatgtttattgcagtactatttacaatagcaaagacttggaaccaacccaaatgcccaccaatgatagactggataaagaaaatgtggcacatatacaccatgtaatactatgcaggcctgaaaaagaatgaattcatgtcctttgcaaggacacggacgaagctggaacccatcattctcagcaaagtaacacagaaacagaaaaccaaacaccgcatgatctctctcataagtggaagttgaacaatgagaacacatggacacagggaggggaacatcacacactggggcctgtcagggttgtggggcgagcgggggagagcattaggacaaatacctaatgcatgtggggtgtaaaacctagatgatgggttgataggtgcagcaaaccatcatggcacatgtatacttatgtaataaatctgcacatgtgtcccagaacttaaagtaaaaaaaaaaaaaaaaaaaagaaaatttcactctctgagtggaaggcctaagtgcacctctcctagtcattaattgattacacagactgaaaacattaatgagctcatggaaattttgaagatacaataaacttattctaatatttcttaaagcatactgcatccataagtgagaccatatgcaattgtcttgagccctgatcttaagggatttaaactagaaaccaataaacagaaagacacattttaaaaaatacacatatttgtaacttcaaaaaaaaaccccttcaagataagactcttcccacaaaaaatataccaagtccaaagttgacttgtatccatctaccaaacattcaaggaacaggtaaaatattttgagtgatgggaatatagttattattgctatgtttgttgtcatctcttgcctgcagaatgaaatatccctaatgaaaatactggtcacttgaatttgtctccaacttagattcaggaagattataatattaaataaataaataaatgcatgtatgtatatgtatatgcaagtatgtgtgtgcatcacacaccatagcactagaacctgcactatgcctgctactggttttcaaagaagaaacaagttatagaaattataataaaaagaagtctagctcagtatacacttacaactttcctagttgcaaactgggaaagatttttcaaacatagaaccttacaatctataaattaaacccaagaatgaaatctcatgtcttcacttccagataaaaagtgctacatagaaatgctgagctttaatttgaacttttaaatcaaactattaaaaaattacaatgggatgatccgttgaaacatgcattatacaaacaaacttcctcagccagcctttagaataagaatagcaaaacaatagtttggaacttcagcttcagctaatttgaaggggctatgctgaaactgaaaggcaaggaaaggtcagtttttttcaatttgtatatttttataggtataattagagaaaagaaacaagagctccaaccttgtatgttggaacagaaaaagaggactactgcattttaattccttgaaaactctggaatgcattaattatattaaattctcttatatgttatgtggttcacaaatcaaatttttcctccaagtttgaaggactgagaggcttcttaaaattcaattaaaacgatgtaaagaaatatccacattatggatacgctccacttagagacctttgcacttggcaggaaaacttttctctttttatcttagtagagttcaggaaatgctaccttaattttctctttgcttcaatatttcatgagtgcctctcaatgcatagtctccgaaagcgttagattactgacatgatgctattttacatgatgtggatgattttatttgtacgagttcaacatgttagaatttttatctctttttcttttacacttagaaaaagattgtaatgtacaaaatgatattctgattttttgtataaacaaacatctcttatactgagatctaatgagtaaaatatgtcccccaaagtttagtattattgcaagaaattattcttcataataattgcagaattcccttcttcaggtaataaacttttactaacagaaggacaaaaatgtttccaaagacaccagggtccttacatatgcaaattaataaagcaaatctattgtcttatcaatgaaagcatcctcaaattcctccatgctttatctgtgttctcacatcatcacaaatccacatctatatgagatcctagagctacagaaaaatgcatgttcagagcacatttcagaccaaagtagtaattaacagaaatatacttccttggttttggtcctcttggtatgctattacttccttcaaaaaaatcaacatttatattgtgcttaggttttaaataaaacaaggatgtacatatgttcataagtatgcgataactgaaatatcagacatccaaatgtcataattattatttttaaaattctaacgtaagtggcatgttttaaaacaaacatgctatgtcgataagttatttgttcaaatgctcataagtacatcttattgaacggctgtaaatgtgtttcggtgcattggatgctgtttatatgcttatatttctgtaactaggaaataaaaagaaaccacatcattaattgtcaggccctccatgtgacagtagaacaaccgataggccactggctcaattaaagtgtgcagggctcgtaactgaagagttttgtttttatcacaaagagggctagagcatgacaggaattcttcataaatttggagatgttatgtaaatatttaataactctgctgtgacaggccatgagtacttgagcagaacctgaccacaagatttaaataaatatcaagcctgggagttgttaaatattgaacatcattatgattgtggtgttttaacaaacaatcattaaaaggtagtgcaaatccaatcaaaggaacatttttaataaagaaacaaagatctggcatgtttacattttggaaaacaaaaatcaaacatctctgttcagttatcctaaatattctcccttcagctccaccaccaaccaaaaaaggggtaaaaaaaaaaaaaaaaaaaaagattaccttggtttgtaaaaattaatagccttcgcaatttcttcagaatttgctctagaggcacagctcatacatgcattgcctttgctatgattaactttggtggtacttttctcctgtgctgccatgcactgttctggaaagcctgtcagcggctgtcttctgttgtctgtgtcacctgagtccttgtgcttgacttcctctacatggtttaaagatggatttgcaccagtaattctttggatacttgaagtgaaacatgctgcccaggtgatgcttttgttgcccaagtgacattgagaagcaggaattgacttcagcatgtcggcttccctcaacatgtcaagaaatagcaaagccaaatcccagatgtggtccgttaatcccactgtcacagaataaactatgtggtcccagtaaacacaaccacccattagcgctaaggagaggtgatagaaaccatttgttaaaggtgacactgttttctaagtgataacactcttttgatcatgtgattcattttgtttgctcaacaacatggtatgtgtttttcctgagaggaaggacttcaatatatatttacttagagcttttaatttatacttcctttcttttaattggtgtcttgtgatctaaaattagctgatgaacatagtatctcactcaaactctctcagctgagttttcaataattagacccactgttgcctgaaattgaacaaacatgtggagacttggcttattatttcttccctagtgctttctatccatacttagagagtgattttttttttttttttttttgagagagagtctcgctctttcacccaggctggagcgcagtggcgcgatcttgggtcactgcaacatccaccccccagggtcaagtgattctcctgcctcagcctcccgagtagctgggattacaggcacccaccaccacacccggctaatttttttatttttagtagagatggggttccaccatgttggccaggatggttttgaactgctgacctcaagtgattcactctcctcggcctcccaaagtgctgggattacaggcatgagccaccacgccctgcctagaaagtgatccttttatttcacatatagtcatattaatcattatcccccaagctggagttaggttaataatttcatgtaaaaaatgaagttcaaatagtcttgactgtaaccttactgaataaagagcctacacgaaaaggaattctttcgtgaaacctgagattgtcagagcactgaatttcaccaataagctggatatcgtttatacaaggaataaaaggtcacgtgtcctctaaaatcccacatttgctacagacattcttccctctattcttttgtttgtgcagtaactagatacaggtacaatgagagtgaattagttttcccagatgagtgagaaaagtaagtgttccccaaatgcccaaagccagattttatctgtcattctctctctctctccctctctctccctctctctccctctctctctctctctctctctctctctccctctctctcagagagaggcagcactctctttggaagaactgtaaggattgaaaatgatccagaaaaactgcatggattgaaaatgatccagatttttagaatttgccctcaccttgacaacgctaaaattacaagcagcagtcaacttttacaagatacccttattgtgtaacatttataggttgccaaaaacatgctaaaactaatcagataacaaaggtgaggagaaaaccttcacctgccatgtagctagcagtgaatacactttttatttccatgacattttctggcagaaaggggttggcttaaggcggatcggactaaccttcaatttgtcatagcgctcactcaaagctgccacctgatgatcgcggtgccgcccaaccagtttacacaaggcacagattaactggtcatcggtcacacagtacatattcaccttctcatcctcatgctccaagcacatcagcccccggatgtgagagtccggaattggctcaatcagacgatggcctgtaaagggcttcttattcgggtgagtggctttcaggcactcgtcacagtaggatacttcacaagtgacacaggtcttcacagcgtcctgggcaggatcctggtcacaaaactggcagaggaccttctcggcggaggtcatggtgttggcgtcaaaggcccgctcccgacgggtctcgctgggagagttgggcccgctcactgatgctttctggaacctgtcgatgatgttctgtagggtgacgttgcgcttgagcccgtctagacctcgctggctgagggtgatgacatgccggcaggtggggcactggaaggcggtgatggactccacagactcgttggtggcacagtgtgatactaggatgcggtgggcgcagttgaagcagaggctgtgtgcgcagggcagtagaagagggtcctcaaagagctccagacaaatagggcaggtcagttctgactccagtgtttccatcttcaggcaaagctctcttgtgtcatcagcaaaacccaaggaagctgatcagctatctggaaacaagaatgtaagatttgattaggcacagggaggtcaaccataggggggtgtcagctttgaatgcatctcagaataattccaaacacaggtcatgaaagggtaagtgtgtgtacattccaaataattctctttctattcactggggaaaaaaggaggaaaaagcatcctgagccatcatataccagttaacattttctcaaagttcagtaactgaaaatgtgcaattttttttttcaattttgttttttaaaaggcttcattcaaaactagaatgtaattgaaactgtaatttccataatttgtatttaatcagaataatcttattgtgtcagagtcaggtttaacctcgcacagaaaattaaaatgtagaaatattcatcaataaactagagtcttttataaatttgaatttataaacttacgtattaatgtatacgagatttaaggacttttactctgcaataccaaaccaggtttcagaacaataggaaggcagtaactatagaaatgggcatgaaatgtacatgaaatcaaatgtggggatttcagcagagatgatcgtgtttaagtgtgggatgtcattttccaaaatatattcctgagaaaaaacattgactttcacaaagatgattgtgatagaggcaatatttttggcatgtgttcattatgtttctgaataattctattgtttaatccagcagtgggacgtgggtaggcagaacgaagtggagaaaaatatctgggggctttttcagtggctgcagtaagtttgagtaccaatgactaatatttagagcaatgatttagttaattagaacaaggatttcagtggtcatcatattcatgtgataagttatgttatgacaatgataatgattacagttgagaaagcaatttaaggaggcttacaaaactgctgagggacccttttggccaaaaaactcccaccacgggcttgtcactgttgccagcaacaggccaggctggcaggaggtccagcctcacactcagagctatgttggcctgggtacgacctctgctagctatgttgctctcctccaggccacccgagggtggcccagctgcctgctccccttgccataaagacctgagtgcttttgtgaactctcatctgccttcccatcaaaaagagtagtagaaagaattccacacaaaccccagttcattaagggtgaagaggcctcatgctcattagcaggcctgggaaccaagccgctttgaaccttctccctttcaagaccattagcagaggtctgcagaccagtgatgggaatattacatgcagcccattgcaggctgtgggagaacagtgcagttcacccagtggtcgggaggttcaaatcacccacgggggtggtggggagagcgttctcagccggatttatgggaaggcttcacatccaaagctatgtttagtgattctgacaatcaatcgtttgtattcacacctccgcttatttacaaaattcacggtttctagaataccctgaccccttctgaaatagcatccctcagaaataccaatatggtgctttggtgaaattaatgctcatcttgctaccaactgaatggtaactgatcattaaaagtataaagtatgtcccgagcctgttaaaaattaaacagctactggcttcataaaagcctggtatcttaaaaaatcttcaaccattcactagcatttattatataggaaagaataaaagagcaactgtgacttgaaatattaaagcttgtacatctttctacaacctgcaatggaaaccctagggttgctgttgtaagaaacatatcatccccacttggtctgtcacctcttcctacagatggctcagaagaaatggaaaggtttttacctattaataattattttggttaatcatagaaaaaatgtagaattatctttaaatcaaagttcttttaccttctcatcagaagcatataaattaaaggaaaaatgtagcccttttggtctgctctgttctcagataaaacaagaatgcctaccaatgaatctgaatagaaggatgagcatcaaattatgtctggagagctatgatgactatatttttaatgcaggtgccaggattccatcccagagaggtgtgatgagaatttctagaaaggattccactggggagacctcagtggaaatactgacattttattcattccttcaacagatgtttactgtgtgccaggcactgagttagatgaagaagccagaatctggggttcacatcacctcatctctattatcatgggccaagccagcatcatctcttatgtggactatcataagacctttctaaatggtctcttggcttctgttcactcctgcccttccccctatagtctatcctccactcagaagcaagagagcctgttgttaaaacatgacagaacatgcatctccttttgctctgccctgtaagggcttcccatttcacccagagagaaattcaccagaataaaccagccccagaaaacacagactcagacagtgagctcacttcctcccacgctacccactcctttctctgctctgagcacatggcctcgttctgactcctcaaacatgccaagcacatcaatcccctgctcgcccctgcaaggtcttcagaatccacatgactctctgctccagtgtcactttctctctgaacccacataaaaccaattccccttctaccactataccacctacccatcgtggtaattcttcccccatctcggtttatttttctttataatatttatcactgacatattcttttagtttgtttattgctccttctgtccccactgtcctcaacactagaatataagctctgtgaaagcagagattttgctttgctctttgaagaacgtaccaccaacacctagaacagcactcagcacacaaaatgactcaaacattcattgattccattaaatgtactgacttttcagctaaaaccaaaaagaatcaaacacagcccttgactttaaggatctctcaatatatttgaacagaggtcaacaaactttttctataaagggtaaaatagtagacatttttggctttgtgggccaaaggggccctgttgcaactactcaatctaccactgtagtgcaaaagcaatcagacacaatacataaaggaatgagtatggctgtgttccaacataaccatatttagaaaaacaggtcacaggccagcattggcctgcacatcttattttgttgagccatgtattggaagatagaggcatatacagataaccagaacataaatgaaaatcattctcagagaggtatgaataaaatgctgtgtgggcaacagcagcaaggatggcggagcaagacttgaacaagcacttacaagtttccagtgctaatgggaaatgatatgcaatgggctttgaatctgacatcaatggaaattatgtgactcgagtgcttaggggcaactcatgtaagaacgaattaatagtagctgctcaaaactagatattttcttttactgccatagcacctggcatagtgctttatgcaagtgtctgtactgtaaatggttaattgtattaggtgaagacacaatactcagatgtggtaggtgaatttcagccaattttctaaatcttttgcctgtatgctaccaaaaaggaaggggttttggtttgatatctatagtgcatcccactttttccacttttacccagattttacaatggcatagatagcatttttgttaaatgactctacagtatcttatttgtactcattccattccttcttctaaaagaaacttagtatggtttattttctagctttctttaaaatatctttttggagaaattaaaatgccattcattccttttttttttttttttgccattcattctttcaccaaatacttaagttcatctatgtacttggtcctgagacaagtactggtaacagctggcccctgtctccatgatcttatggttcattccgagagagaaaatatgaacaaggccaggtgtggtggctcatgcctgtaatcccagcactttgggaggctgaagtgggataatcacttgatcccaggagtttgagaccagcctgggcaacatagtgagaccctatctctaccaaaaaataaaaataaaaaaattagccaggagtggtggcacatgcctgtggtcccagatacttgggaggctgaggctgcaatgaaccgtgatcatgccaatgcactacagcctgggcaacagagtgagcccatatcgagaaaaaaaaatgaacaaggtgtaatgcaacataaaaaaagatgcatgccaaagacagacagggaataatcaactctatatagggggagaggagacagggagaagcttcctgaaggaggtaaagtatgaagtgggttttaaaagatgaacagggattcaccaagcagatagtggtacatgggtgggaattttatgcaaaatgttatctttcttttcactctctctctctctctctctctctttctctctccctttctctctctctttctctctctctctctatatatatatgtatctaatacacacacacacacacacacacacacacacacatatatatatagcttacattgttatttatatcattaataacagtatcaggccgggcatggtggctcacacctgtaatcccagcactttgggaggccaaggtgggtgaatcgcttgaggtcaggagttcgagaccagcctggctaacgtggtgaaaccccgtctctactaaaaatacaaaaaattagctgggtgtggtggcgtgcgcctgtgattccatctactcgggaggctgaggcaggagaatcacttgaacccaggaggcagaggttgcagtgagctgaaatcatgccactgcactccagcctgggcaacagagcaagactctgtctcaaaacaaacaaacaacaacaacaaaaaccccaatatcataaaacagcagcttttgccttttcttaactgtcataatgtaatttccatgcctcaaaaaaaaaaaaaaacttcttcatttctacttcaataaaaggaaatcacacatgcatattgttgtcaggaaatcctatagcttaacatttttgtgaatgggcagattggtcctcattgagaagaggatctagataatcttgagagtcccttgcaacaaactgggaatggcaacaaatcacagctcacacctctgcctgtccatggtttaaacatctagaacacagcacagaataatgaatgaaaggggagagagctggacaggtgacgggataatctaagacatcctgcagttctgctacttattagctgtctgagtatccatgggtgagtgtccacagatgttccctacagtccctctagcactcactctaatcactcccctaggcaggagagtcttcagtgacagattacagtgaagccccacatcgtgggaggcattggatacatcttttgaaaaaactttcttatagattcaagacttatgaggaaagtacttctttaaaatggaaaattaataagtagatgttttgctggaaaataatgatgtaaatgttttcacacctccctcttcttcctttcctttcctctctcataatatgtatcttagtccattttgtgttgctataacagaatacctgaggctgggcgatttataaacaaaagaggtttatttagctcgtggctccacaggctgggaagtacaagaagcatggtactggcatctgctcaagagaaggaactttgctttataacaactccattctcatgggaactaatccactcctgtgagaaccaatctagtctccatgagagcaagaactgactacctcaagaagggcatcaagcgatttgtgaaggatccatccccatgacccagacatctcccactaggcccctcctcccaatgccaccacattggggattacatttcaacatgagttttggtggggacaaacaaaccacatcactgtatgtcactgaaactgtactttcctagttttcctctgtctaaccactgctgacttctacctcttgctaatcaaagcctaagtgttttctgatggtctatggttcctttgacagggccatccagttttttgtttgtttcatgtactgcctctctgagaatgactgctaggcttgtatcccaagatggtcgagaacccctttctggaacccggtttagcactgacagttctttgcttcatgtactgcaagtgcctcagacttggaatgcacatgatgtgggatttatcctcttccctcattagcctgtctttgtcttctctacagggctcctggtgtctcctcacagggcttctgtcctcctggtcaccagacagcagacaccacagtttctactcctccctctttgggggaggcacaattatggtccccaaagatatccacagcctcctcctcagagcttgtgaatattttaggttatagagcaaaggggactgactgttgctgatataattaagattgctaagtagctgaccttgagatggggagagcagcatggatcatctaggtggacccaaaggaatcacaaggctctttaaacgtggaagtggcaggaagaagagtcagagtcagaatgatgagatatgacaaagactcgaccagccatgcctggccttgaagatggaggaaggggccacaagccaaggaatgcaggctagaagctggaaaaggcaaggaaatgaattctccccaagggcccccaaaaggaatacagccctaaagataccttactcttagcccagtgagacctgtgtcagacttttgactctagaaatgtaagataatgaatttgcattgtttaacaccatcaggtttgtgctaacttgttacagcatccattagaataaggagatcgcccatcatcagcacatcatccataatttttatcccaaatttcccttaatggaggcattgacctttttaatgataaggtaaacccacctctcaatgctttcctacaagtattctaggttatgtctgcatactccatgaaatacaattatttttctaatttggagtatatgaaaaagaacatgcaattctatcaattctatcaataattttacttccagcccctcactttgtacaactctaaagccttcactaccagggaaattagtgagtcattagaccaaggaataaacttgtatgccaacactgggtggcctgtgattaatcgttaataccacgtggctgtcagccactgcccagatgattcccaaggcacttcctctagttcttttccaaatatcctctggactatagagactaactttattgttaaatttaccaaaacataactgagatgacaaacacactgttaaaattgcacgatgttacagcaagccacacgaaaatggtttcagaacaggaagctcctataagtatttcaaacaacaaatagcattgaaaatgtacaaatgaattatttgagagtcctaaatttcagaaacgaaatcaagtcaatttacttgattgtccgctcctcttaacccctattcacctgggtaattagatttagttgactattgctgtttggatttttgctatgagattatctttattatagaactataggtgaaatattttttaaagactgcagagtgatgtttctatcttggaccagcagaaatacagactttcagaggactcaaaactactgaagtgtgaaacactggaaatcaacctgagtttgggaggcagattgcaacggggacccaactcagaagggacttgctctcatcttaaataagcataatttctcaactcaaaaacttgtctaacacaaactcaataaaaactggctgctacatccaagatgaattcatcatagggtattttgaataacataatacaagcactcagcatctgcatattcaattatgccatttagtatttgactttgagtgataaagaccaccgaataaagacactacccaaatgttactttactgattagcactctggccaatttgagaagcaggtgggttagcaaaggcacagtaaaacagggccatgaactgatggaaaaaggggagaaggggatccagttggatttaactgcattctgaaagactggaaattgatagcataatgtaggctgtttcagtacaaacgcaaagtggttcttaaaaacaacagtataaataatacatcaagtaagaacaggtgaaaaaaggtgatccagtaacattttataggtaaagaatgttactctgaattatcactgcatttagcctccaaatgtcagcacactcaaattcatttgctcaaccagtaacagacaactaagaatttctgccaagaaaattgtaggggaccagagggactgtttgaaaaaaaaaagtgacaagcagatgagcactgagatgctagcctcaagttttaaaataattaatacaatagatattttgaataacttgacatttcttctttaagaagtgctgaaattattattattattattatttttttacctcatatctgaagtgagaaccagggaagacttttaatttcgccaaacacccacctggtggaattcatgcaaatcaaattaaactgttaaccaaatcttttctgtactttcacatctgcctataacatgctcattcttagtaactggatctctaggacattctttaaaataatcacatactcgcctgaccatgcaacctgattaataatgaatgaacattcctgagaagaatcacttcgaagcatggcagatgtctgtggggatatgaaggctttaatgatcaaaattaaggggaaatggaagctgggtcacactgtctggttattttaattgaaacctagtcttccaaatttacttaacagaatacttaaacactccttctcgaggttcatttatacaagcagacaagcacaaagacaaatggcaatgcaaaagaacaacccagattcctggaggaacaaccaccctatcctgttctgtcctaatagtgcagaaaacccctcagcagtttcagaaatccaatttgttcaattgaaagactgataaacaggttaaaaacaggaactagtacattggtccttaatagttctttgagcacctctctagattctgacaaagagatcaccttgaatacccaccaatggactgcacactagttctttttgaagaaacatcgccgtaggcagaggatggggacccacgaaatgatagacaggccaccgagaccagacggtgggtggcaggcagtgctggagcggtcctgtgtgtctgtgagtgcgtcaacagtgaaacacaacaggaaaatcggtccaacaattccaggaaggccagctccacctcatccactccgccagggttgcccgagttgaagaatcaactgccttttccacggcccccgccacaacttccctatcctctggcctactcaatgttcaactgaacccaaatggaaaggtagctcaggtcagctcaacacccactgcctggtccaaaaaaatgaggacttggcaacgggatctgtactctcattccttacagggaccagcagcagcttggccgaatgagacactgtcctgtggcagaaggctgaatgctagctttcaatgccaccaataggagccgtcctgcccagctcctggggctgggaacaggcactagactcatttgcctttggggcctttcagtgtcgtactgagcacatgatcacattatgctctgcatgctggcttgttcatttaaaaaaataatatacacattattttgtgcctttatcttctgaattaatgtataatgtctggaagaagttttcttcaaagttatatcaggaagaacaatctccagtacagacacaaagaacagtcatttatttcttccaaaaatagtgacctaaatagcaatctatcatcctgataaacaatttaaaatatatgtatatacacacaggtttcacatacacacgtatgcatacattatgtacacacatatataaaaacatcgtgtgtgtatatatatatatatatttaatattacatacacggtatatatataatagcaaatctgtgatgggtgtccaaaatttcagtctccagaatggcaaagaaagggtgaactgagaatggaaagaagtaatcttttaaaatttgattgactaaaggaggaaggggaagtagtcttcctaaaagaaaaaaaaaaaaaaaaagtcctgcgctgcagttctttgaaggatattgcttatcaccatgcaagacaagaaactgcaagtaaagtaaatcatcaggaaagtgtttaaaaaaagaatcttgcacaattcaattcataatccagacatttggactccaccaaaggtgtttaaggaacattcatgataaaggggaagcagaggcaagaactgcttcctcgggctgcccagtctgcacgtctcaacatctactttattgccattgcaacacttcacagtaaatcaaagcatgcttcacatgttaggacataaaaatgcaaacatagattttttggcttatgtctctccaaattataacttcatttgtcttttaacaatgaataaaaggattactcaatttcacatatagatgacttccttaagaagttctcattgtcctcggaagagacacacatagatcatcaagtagaattctaaagaacttttcatcaagacatggcttttgttaaaacaacatttaaattgtcaaaattctacaggcctaacttttccctattttggcactgtagtggaaaattagcctgaacatctgaagttgaaacatcaggaaagaaatatttactccacccctcaagagaaaatgataaacaacaaaaaaaattacaatcttctaaagggcataatctgacaacttgcagatgaaatttcccactatctgaatgtctcagacatttcatgtcttttacagtttaagaaataaagcatttagttttaaaggcacacagaacctattttacattatattgaaaatgaccgatgttttccaggtctatgctgtactgggtatcatgcaagaatttggttctgaaggcaatgatagcagactggacagagaggaagagggtgagagatggccacacctagtctcctggcagaagtctaaatcaaccctcctggtgaacagaccaacagcgtgatggtagcagaaatggaagtcactaatttctgtgaaaccagtcacagatgaaaagcttttaacactgctgtccctgaatgctttctcaaatgtatttatagtttgataggtatttctatatatattcatataactatgtctgtataaagtcctatatatgtccataatggaattagtttttgtagttatatacaatgtgcatgtatacataagtacacatatacatatacaaaagcaccttttcagaattatttgagactggctagaattcactcttcacaaacccctcagtcatagcatcccttctgcattacagaaacattccttccttagtgcagaaacagaaacctgtagataatgtttatttaaaaacaactgcctgctcatatctgcaaaaggtcacctggaaatgagcaaaatgacgcaagtgatctattctctgaaagaccagtcaagtgggatttttgcagcaagtataatagattgtgccctggagaaaagcttgccgcttggggaaactttttctcactttatttatataatactctcctagaaggcagagaaagtacacaccctccccttcccaattattaccaaccaggagcaaaatagttattgatgatggccaatgcaacatttcacaactgttctctgaacactggaaagcttaagttcaaagacaagaacaaatactagtctcgtgactcatggaggtaatgacgatgttatagagtaactgattcccattgtgtgagcagattggaaattctctcaaatatgatgcctccttttctcaaagaaaatcgctttttccctcaacttcaaagtcagccacacacaaaaaccttttgctcacaataccctgaagctacctcctgatcttaaaaagtaaggaaaacgaacccttattcacaactcctggttaactattacgaataacatgctttaaacatttcccctgatcactgaagctctgcagtcaggggaagaagtcttttttttttttttttaaaggcaacagaaagaggagtgactcttttgttctgaatgttattgtaaagcaccacatgaaagaagaggaatgatgggaacatggcaatgaaaaggacaacagcgctgacaaatgaaaacaggatattaagaacagcgtcgggactgtgtgtctgtacagaacaaagccgggagccttctcggagaaattcaagcaaaaatactcttaacagatttacatgctaatggatgaactgtagtttctccaggtggcacagatctttaagtctgggacaataaaattaggttatcattaaaacacatacacacacacacacacacacacactgtaaagtgtcataaaattaaaactgccttcaaatcacattcaatcacatgcccccccccgccccgccctttcaaccagtgatctgcttctggaaatttctagatctatgtttttctctttgtaaaataagatactggttctgtcaaataactgagctaacttagtatatagtcccaaggaaagtgaattttttacaaaaagaaaaacaattttctctccattcacagcacactctaacttacactttaaatataacttttcaatagagctttcaagaactcccagggaaactaggcaatgggtactgtgctgagaaacaatgacagcaactaagtggctaacattaatatagtataccgcttttgccaagtcatggtggtaatatcttatacttttcttctgatgcaaattctgcaaaagctgctagtatgatggtacatttaataaaacatcatcatagcttattggacttatcacataagaattattattgtagtctctaaagaagttcaaaaaagtaaaaaaatatgtctgattttgcgctccattaaaaatttcagtctttttttttctcttttctatgttttgccactattctccttttccccacttcctgatcagtcctttctattgtcagatgagtgatgagctgatgtgctttcttctttaccaaagcatttcatccagctttccctctggcatgctttcagaaaactttgggctaagccctgagctcagtgtgcccaagtgttcttggtctagttttgggctgacactgtcaatgtggtgtcctgtaaaaaaaaaaaaaaaaaaaaaaaaacatgtagaggtcaggcgcagtggctcacgcctgtaatcccagcactgtgggaggccgaggcaggcggatcacctgaggtcaggagttcgagaccagcctggccaatgtagtgaaacctcatctctactaaaaatagaaaaattagctggtcatggtggcgggtgcctgtaatcccagctactcgggaggctgaggcaagagaatcacttgaacctgggaggcggaggttgcagtgaaccgagattgcgccactgcactccagcctgggtgatagagtaaaaaaactcagtcatataaaacaaaacaaaaacaaaaaacaaacaaacaaacaaacaaaaaacatgtagtaccttgaagccagataacctgagttcaaatcctggctctgccatttccttgcaaaggcagatcggagccagatactgtacatatcttatactcacagatgctcttcctatcttctatgcagtttccttatctgagagcaatcttaagggtcctttgaggattagtgaggtgaactttttaaaatgcctgacaaaattctcactcttatggaaggacagggtggtaggggatgggggattggggtccttcttcccttcttgtcctgaatcgcctcttcccactcttctttgaataaattcattatctgtgttttttactggaaacctcttcataccatttttgcaagcaagaaggatataaatccatttattcaataacatttatggagcatcttatgtgaacaaacagtatgtgaatgtgaaatgaactagcatttttattcttaacactaatgacttatcttcacattggcaatttcatctgtttcctacactatgacatacctctgttcattaccactgatctcccaccatgaacttggggcttcacttccgcttcccagtgaaggtcaccctgtcccatatgcactctttgtcagaatttttttattttgcaggaaataagggaccctggcatggatggagcatgtgaaactatcaagaacagtgaaatgtttcagatttttgctatttgccagtttcgtttcatgaatgctggcagaagacacctgaatcaaagataaaggctgtttttactcaaatggtatgtgtttcatgttctgttggttccccttgttctcgaagtcctacggagcatcctaggtccatgtttgcacactcaggagatttgcatcatacctaagcaactccaagcttaggaaatctgaatcttttataatggactgcaagttagcctgcccaacttttgccctggaggaagacattgtctttaatataatgaacaacaaacaaacctgccttctcccctggcgcgagatactacctctatctcccaagactgtttgctatacaaacatcctggggaatagtctggaataaaatcattcagtgctccagctcacaagaggtacaaaaaggtgatagatccatggaaaattatttcctaatagacacaattcttatctcctcctggggatatggccaatagttgttactagaaatcagatcatcactggactttctagcagttaccacagaggcagaatttcatttggcactgaatgacccttgagtcatagaagactagaggtaaaaggagcctgcaagaaagtgataagaacttccttaccaacggctccaagctccttatccaaccaccctctgacatcagctgttgtacaaggaaaattggcagaaagcaggtaagcctcacccatagattttgctcaaataaacagagcccttaatgtccttcatagtcccaaaacagcttgggtctggtctgcaacttcagctcttcactctgaacctaagctaattttaagagtttggtgcttgtttcagcagcacatagactaaaactggaatgatacaaagaagattagcatggccccaatgcaaggatgacaaattcatgaagcattctataattttttattattaaaaaatattaataaaataagagtttggaagagtaagctaattttgttacttttatgacactggaaatcctatatgtatatccatttggctttctttaagcattaaaaaaaattagaactacttcttttggagtaaaaccagatgagtcatttctttcattactctttcattccactggtattttttgaggtcattctgtgtgccaggagctgctctaggcagcagcaaattggtggtaaatatgagcataaaggcctgcccttggagagcttacattttaatgaaggaaataaaaaaataaaaggtttttaaaaacacaaacatttcaaagactcatacataaaatgaaagaaataaaaaggatgacatgatagaaggtagatgggtggtgcaaatctatgttagctaaggggatattactactcatatttgtgctggctttcttgatattttggctttttccctgccaataaacaagcaaagagtatctgaatttcagtataaaactttctggtgtttggtcagagggttgtgatctaatttttcaagttgttaaatgcttagtttcagattgcctcaaggatagagttctttttcaagggcatagaaatccaacttttactatttcttacaaaaaaatggaatgtgatgaattattgtaaagtagtgacatctttatttattttagcaataaaattttgaaagagaaaagccacgaacacttagtgagccaaaaaagcaggaaccatgatgttttagtccattttgtgctgctataacagaattcttgagactaagtaatttataaagaacagcgatttaggccaggtacggtggctcacgcctgtaaacccagaactttgggaggctgaggcgggtggatcacgacattaggagttcaagaccagcctggccaagatggtgaaaccccgtctctactaaaaatacaaaaattagctgggcacggtggcagacgcctgtaatcccagctactcgggaggctgaggcaggagaattgcttgaacccgggcggcagaggttgcggtgagcagagatcacaccactgcactccagcctgggcgacagactgagactccatctaaaaaaaaaaaaaagaagaacagagagcaggttaggggcctggtatctctgtttccaaaatggcaccttgaagcctgtgtcctctggaagggaggaatgctatgtcctcacatggcaaaagagcaggagaggaagaacccacttccacaaacccttttaatagcggcattaatccattcgtaagggctttaccattaagccccacatcccagtactgctgcattggggattaagtttccaacaaacgaattttgggagacacattcaaaccatagcatatggtattcagaattacctgaatatcttaagtgtttgattctacgatgttaactcaaagttgaaaataaccatggatgtacagttaagcttatagggatggacaggaaggaaatgaatagagacattggaagaggcattggttttgtcagtacttactcaccagcttttgcaccactggaagaggaaatttcaggaaggaaaggaaggaaatgagggaagagtgctgggggaaataaacacatgtgactacagctttatgaccggtgagcaccaaagatgagttaagactagatcccactggctgacagccaatgtcttttgaaatgtcataatgtcatttgacaatgacaataatatcaaaaagcatctcaaaataaataaattcactggctaggtaaaattgcaatagcagctgaatcatgattttttagagcccatcactttaagaaagggttagaaggaaaataatcgcagagaaaattgggtagcaggacgagccgcagacaaaactcctcagacaccaagttaaagacggaaggggtttattcggctgggggcatcggcaagactcctgtctcaagagccgagctccctgaatgagcaattcctgtcccttttaaaggctcataactctaaggtgggggggtccacgtgagagggtcatgatcaattgagcaagcagggggtacatgacaggggcttcatgcaccggtggttagagtgaaacagaacagactgggaagttttacaatgtcttcctataatctatagataacatcagttgctaggtcaggggtggaattttaactaccaggcttgggtcaggcaggcccaggcccggtttcaggtctggttccttggtttcacgtctggttgctaggcgccgggctacctgcctttagttttgcttctctttccttttctgagtataaaacaatataaaacaatatgagagggtctgtctctcttctctcatttcccccctttgagactctcactttttattagtgggagttctcactcttatttttgctacttatgtcttcctgtgcaatagattgataatgattcacatatttacacttgtgctgatacataacacgaagtgacactgagagactgggctatatgctcggctaattgcaaaaacaaatttcctgtttttcctggaatttctggtactgacacattcagttcatcatagaaggtttgaaatactggctcaggagagcgtttataaacttttcctcaaaccacgacatttacttgaagatccagtccagctccatcaatttttagggttacacgttcctcttttttctagtgaggattaagggggttggttattactagttctaaggggttacactgaccactggtacaggaagggccacttttcccttgctgaaggtggacaggattttttttttttatccaagtagcctaaatgacacaagaccagtatccacatttatttttacacagtcttaatttatgataaatgtacttattttctgccatatagcctctttcttaattaagagaaccacatcctatttttaacctattattattaatgacagcacaggcatcgaatttcaaggtgacttgtttgggcacttctttttttgttttgttttgttttggctaacactttacttgtatcgtttatgagcctccaccagtcttcagtccttaatcttattttaaaaactatggtcatgggaggctcagatgggtcataacacacatcaggttggtcatttcccgggctacataccttgtatagagtaacattatacaaacaagtttttttagagttccagtacacttataataactgtaaaataataggactgtagcaaccttttgtcccacttcagtgacttgatgtatatactgggaacagccctcagtctgaggaaggtcagttgaagtccttactgtacaagtccaaattttaaggaaaatgagtcctgcgatgagtttcctcatgtttcggccgtgcatggaccagttagcttctgggtgtgactgaagcagggcttgtcgtcttcttcagagtcactttgcaagggttggcgaagctgctcccatccacgtacagctctcggtctactgatgtttaaggatggtcttggaggttgggcccactagaataaactgagtctaatacctctacacagttatgtttaactgggctctctgataccaggagtaaggtggcggggtttagagtgttgcaaacttcaattgttatgtggggattttcacagagcaagctttggtatctagttagtctagcattcattagctaatgatgtcctttggtatttattaaagtcaccacagcatggggggactttatgtttaggttttgcctaagagttagcttatctgcttcttgtgctaacagggctgttgctgctagggcccttagacatgcaggccagcctttggaaaccccgtctagttgttttgagagataggccactggccttggccagggccttacagtctgggttaaaactctaactgccatgtttttctttttctgacacatagggtgtaaagggttttgttaggtcaggtagccccagggctggggctgacgtgagtttttcttttaactcatgaaaagcttgctgctgttggttgtaatagatgtagtttactaatctacatttttattaactgtcatctaccaaaatattgactcaaatcctgtaactatttgatttcaagctttacattgatctggtattcctcatgggactccaattgcgtctaaatggacatgagagttgaaagacctacaaggggcttctctcgctttacaatgtcttattttttctcctgctggttgatgaaatgccagggtgaaagggatagccaattggactaaagtataagtgccactccagttattcggcagagtgcccagtaaaggtccaccacaataccaccacacatccgcgtgaggatgaacaagggctgactgattgataagctcttgaaaattcttaagctcatcgcatcccttcaggtctccaaggaatgctaagtttcctccctgtcgtgagagacacgaagtgaacttagtgttgggagacggaggctggacagccctcgggggctgacccgcagggtgccggactttgggatatagcagagagagcttggcatgacttattactccaggctgtagaatcctggaaaagaactaccacacagtccatgccttgtcgactggaggaccaccttagtggaagggggacaatcagggcctctggcctgccatgtgcacaagcataacaattgcttttgtttaacgtgcacatggaatatttgatccattccaaccaggcatttgcatcttggtatgctgtcttaattgccaaagtttgttttaagtttttaacttttatgatcttctagtaaaatgaatgtttcctttagcacctatttttattagtttttagaccaaagaaagccaaataccattttacatttaacaatgctttctgtatgatttttatactagataagccaaattttacctttatattagtgttattgatgttaaacttaattttaataaaaccttgtagacatatttatctaatttttaatgtttgaccataagcaagattttatatactctttttaacctttcataatttttgttaaagagcaggttggtgctttaagaaaaacctgttgcatttttattttaatgtccagttcacagaaaaactggatgatacctttttaactttagctaatatgtttacacacagaattttctttacaattaacgtctcaaaactcgcttaaactttcaaaacaataatttttttaaccttttaatgtaggtaaaaatccacattcttatgcctccttataatccttttaccaaaggtatattttacttttcttatacaccttgaacataaactgtttcttcaatagtactgagtacttttaaattatacaacattttttgcataattttttttttcccgttagcaaagcagctgccgctacagattgaatgcatctgggccattcgcgggttactgggttaaggatttttgataggaaggcctcagtgctcttgggatatgcccttgtttacactgacaacaaagtagtattagagtgttacagggttactgagaatacctttaattattaattacaggtttttaatttaccttggcttttaaaggaatagggtatactgttgtttttttttttaactacttgtatatttctctctttctctttttctttctctctttgactttctgtctctctgtctctctctgactttccttttgcctctgtttcttcctctctttctgcctctctctttctgtctgctggtctttccttgcctctgccagccgcttatgctgctgttctcttaactactgtggggggaaggggatctaaaaccagctgtaactgtctctgtacggaaactggtctgggtgccttggcttacaggctaccttgtgccatacctttgaaacaagggacttgtctaggcttccttctgatggccaagccacctctaatgctggccagtctatttcacacaaagttttaagttctcctggtgtcatagtactccatagtcttccttaaatcctttcttgaaatttttcaacatagttcctagtagggtgggcttatttgtgcctgacccatgcttctttgagacaaaacaccatgctcacaccacacgcacaccacaaaacaaagaacaggtaaaaagggcacacacacacttttgcagtttacaccaaaccagaatcaaaaccaaaattagagtatccagaaatctaagccaggtcaaaaccaaaactaagcaatccaggcaatccaagtatcaagcaatccaagtcaagtcaaaaacaaaaaccaaagtgccggtactgccacaccgtgggtgatcaggccatgcttccactcaaatggagtaggcaagttcctactcaaatggagtaggcaagttcccaagaccagtcctgtgaagcaattcaaaccaagtcaaaaccaaaaccaacaccaaagtgctgataaaggcacgctgtgggtgatcaggccacgcttccactcaaatggagcgggcaagttcccaagaccagttccgtcaagcaattcaaaccaagtcaaaaccaaaaccaaagtgccgataaaggcatgccgtgggtgatcagaccacgcttccacacaaatggagtgggcaagttccaaagactagtcttaccaagttttagatgtctggactccaagtgccagttccttcccagtgttcagccactgcgttgatcctccacgggggcctgccacacacggctctggcgaggcgtcccacctgggcaaatgcctacccgggagcgctctcaggatccgcgtcgctccggctggttggagtcccccgcagggatgttccacagggcaggctaaagccacctaaggagctgcctcaaccgtctgttaatcacctcgcttcctggtcagggaaccaagaaatgtagcaagacaagccgcagacaaaactcctcagacaccgagataaagaagaaaggggtttatttggccagaggcatcagcaagactcctgtctcaagagccgagctccccgagtgagcaattcctgtcccttttaagggctcacaactctaaggggggtccacgtaagagggttgtgatcgattgagcaagcagggggtacgtgacaggggctgcatgcactggtggttagagtgaaacagaacagaccgggaagttttacaatgtctttctataatctatagataacatcagttgctaggtcaggggtggaattttaactaccaggcttaggtcaggcaggcccaggcctggtttcaggtctggttccttggtttcgcgtctggttcttaggcgccgggctacctgcctttagttttgcttctctttccttttctgagtataaaacaatatacaacaatatgagagggtctgtctctcttctctcagttgtaggagaataaagttgctattgtagctatagcagagaccaagagaagagcttgggaagtctgggtggtgggtgccctgtgccactcttccacagtgaagcaaataaggtttgtgggaagacagggtcgcagcattccaggggaggggttataaagcaagtagtcttctgagggtgagttattcccagcccaaagactttttggcctaaaagccaagatttaaactgtttatttggagacttgagaattctgcccaaaatatatgtaaaaaaaaatgtactctatataagaacaaatcccataaacgctaggaagcttctaatggcttttaaaacatattctcaaggcaggctaaagtctgagagattcttcttgtattatcaaagtatgcttccttgttatctttgagataaattataaatgtaatttgtaaaacacgaatacaaggcatgagtttggagttaatatcaaaaggtatgaccttatccctaaggttatcccttatccccaagggagttgacttaagagttttttgttgttattttgctttgcatcttatttgtttatttaaaatttaaaggaaaaaagtttcattttaaacaatttaattctcattgaaatgcattttaagtgtgagtttcatcctgtacattttatccattgaatcaaattagacaagaagctggcttttaaacattaaaaaaaaaggcaaaattaaaataactcagtacttaagatgcaatctagggcttaaaaattcacttacaaaaaaatctagctttaagaacagtgagctttcaaggtggctaagctatattaaagtgaagttatacttattttgactataaatatgaatactgattagagaaagtatcacacaactatatgagaacacatttcatttttgaaaaaacaaatttgaatgcctgatttgtcatcttcatggtaaagatatgttggttctctcttttacgtagctcctttagcttgtccttatataagtcaacagggtctcttgattcagggcatagttccgaacaattctgccagttgtctaaatctattctttccattccaaattccaagtgactctttctctttgaaacagatgcaaatagttagtttcacaactttagtcattttcatccttagaatacagactgggaaattgcacactccaggggtgctgggcaaagggtgccagaccatggcaaggatgctggtgacttcaccgaagggagctttattgtgccggagccactgccagctaccctcctccaagcaccgactgccaaaacatcacagtccaaagaggggtgctccgttcccccttcccacctcccccccttcacctccctgcctatcagcatccagaagcaattctttgcatgggtgcttcttcatcctgatcctgactggcagctccaaggattaaactcaggtcctttggagcagtcgctttatgcacattagccccctggggtgttgaactccaaaacctctattttttcccccgggtctaccctgtatctcacaaaaccctagttagccactgtggtacacagtctttcttccattccaggctatcaaaagaaaacaaaacaaaacaccagaccttacaacaatatgatggatatggtaatgatcgagcgtctttagggtagtgggtaaattccaagttctttcataactgagacttgggaactcgttttcttctttatcattaagacttcacattttcatcagcagaatcttgcttacaatagcacaaatgataatttggctgaatgaaaatggcttgtggtgtgtgtgtgtgtgtgtgtgtgtatatgtgtgtgtgtccattaaaaaaagttcctcaaaactgctgaatgaaaatcaagaccagtgtcttcttaatcaaacaaaatttcctgcttagggactgcgttaaaaaaaaaaaaaaaaaaaaaaaaaaaaagaccatctggcctctctctgctatttgaggggtttttttctcctcctcacttcctggttatctttagcaaaacattatcatttctcgtataaattgtttttaccacggtgcatttccttctgtgcattactttaataaatgggatagaaagcattgctccatttcttgaaaaatacttttcagctctaaatggcaggtttaaagggggaaaaaatgaaaaatgtgcttaaaaaaaggaagatggaagtcaaatcacagtgagggcattaactactcatgtttctttaaacacttctgccaaggcaagctctttctttttcatatatatatacatgtatatatatagagagagtaataattaaattccaaaaatgaaaagccaccctacgcaccctaccctactcatttaaggtgataactatgctaaacaccctccaagaaataagtctgaaatggaattaatttccatgtgggaacaaagatgacaataaaaatatgatcaaatctcaattaacttaaaaaaaatcctaattgaaacatttctacaatgcttgagtccactttacttgcataactacaaatcacatattggatctaattgaaaagtttgaggtaatttcaaatcttatttttccttgagatcatcattaaaaagaccttttttcatttgatcataaatagagatgacgtaggagattgacttgaatgtataattgtatccatgaccatggatttttacagtaattcataatatcaccttcttccttgtatttcacaaatctttaggaaaagtataatgtagaaaacttgtggttaataaaggtttgacattttagcaaagttcaggtaagctgaggtttttgtgcatttacatgctaaacaaaatgacaaagattcctgcttttctcactgctgttcagtaagagtaaaaaatgaatgataattttaatatagtacttccgatcaattttgttagcacaaactaaagactatggaatactttgagaaatatataaactaattgagaaagcactagtgtttagtttcccagtggaacacaatggcagctcaagactggtcccaaatgtcctccttccatggtgcagtcatgtccagtccagcttgggctccccattccaatttcccacagaaatttatactgtgccacctgagttaccaaataatgacaccataattgaatcaaattattgcccaacaaaaagagacctctagtcttacattttagcgttccaccctttgatgaaggttattgtagaagacgctcctgtattgggtaggagattgggaaaatgttagctaagatcacttccagctctacaattccaaatagcttgcattgtatgagggaagataaggataagactgggactcatgttctctctctgaatacccacacactctcacactctgtctctctacctctgtctctgtccctctgacacacacacacacacacacacacacacacacacacacacaccactttttcttttggggagaggaagatatcaccaagtcctcatcccccaaagcaatactaggcaaatttattttgaaatcttttatatgccaagaactctgatagctactgagcacacagtagggttttcataaatatttccataaaggactgaatgaagctcaggagatctgccatctctcacttatgggcctacaaaagatattcttagagggagaaaagatcaataatgtcagatttagccgtggtactggtgtttgtgccgatgactattttgaaaatagtacagttgttacacactaaaaataggactgtattgtaaggcatatatatctgtgtgtatatatatttatgtattaatattatcaactactatgtcttgggcacaaatgtgtgaagaacattttgaggatgcatgtattgagtatatattttagatctcaatctgtaactcagtttagagcttgcaaagataaaatcagtgggtccttatttttgttcgctttgtccttctatctgtactgtcttctctcagtatcttttcaccaagccttgccctgaagaacgataatgacaccaaaacataggcactttttctttctaaggacccctcaagggatattataaacttaatgtcttggggaattctgcagagactttccaaactggtatactcaaaatcagtgtcaaggccctgagggtgattgggccccaacttctgtcaccacagtgatttccaggttgattgggtgcacgtgacatccttgggtcaagggtatggacaagtagccctgtgccatatagaaccaccaaacactcttccagcccatagaagcagcattgggaagtactgcggattattacctgctgactgtgtgtgaagttgtccttccaataaatacttattttccttagaaaagggcaaaaaggtctcatgatacattacttaggtaactgttataccctaatagagtagcgcacttgtattaattcttcaccatacaagacaaagaatatatataaaatttggtgacttaatggaaataatatttatttagggagtgatgaattctaggcaaaataaagaatgcatcaatattcctaacacccaaatggttgacatgtgatgcaatttacataaggcttcctttgaatttcattttttggagctttccttcatatatccataactggcatttaaaaaaatacctacaatatgccaggcactttatacaaattgggtctaatccctacccaatccctaaatagtgggtatcattttcccccttctgcagatgaggaaactgagacacagagttaaagcatcttctccagggccacacaactggcacatggcagagaccagtttagaatctgggtttttctgactcttaaagatctctttctggaagtgaaattactatgtcgaagacacacccgcatattcatgtttattgcagcactcttcacaatagtcaagatatggaatcagcctaagtgcccatctacagacaaaaggataaagaaaatatatttctttatggggatgattaggacaatggaatactattcagccataaaaaggatgaaatcctgtcatttttggcaacatggatgagcctggaggacattatgttaggtggaataagtcaggcacagaagacaattactacatggaacaaacctgcacatttaccccttgaatctaaaataaaaattcaaattataaataaaataaaataaaatttaaaaacattaaaaaagataaataccacatgatctcactcatatgtggaatctaaagaagtcaatttcatagcagtagagagtagaacagtggttcccagaggctgctgagggtatgggggaagggaggaacgggtagagattggtcaataggtacacaaagttagacaagaagagtaagttttgatgtgctatcacacagtagggtgactacagcaaataacaatgtaatatatattcaagacagctagaagagaatattttgactgttgtcaccacaaagaaataataaatgcttaaaatgatggatgtggtaattaccccaatctgataattatactgtgtatccatgtactgaaacatcacattgtaccccataaatatgtacaattattaggtgtcaattataagtacaaattttttttaaaaaaaatttctttcctcagcaacatattgctgctacagcttcaaggaattggaaatttttgataaactaatatgaataaaacgtggacgctgtagattctggcagtatttcaactacttctaaactttaattttgaaaagacaaatagttaaacattggtcatgtgttccttcttcaccaggagctattcagaaatttcacaggctaaaccctcccagttctgtcttagaaggactgacatctggatcatattggcaagggggtgctttaaacataagagaaaattaggagaaagacctaagactggattacttccacgagttcactcaccgatacccgcccaagtactgtcttttttcttgtaactagcttgtcacccattctttctactcagtgaacaatggcttgtgacctcacagttagcgagttcataggagaaatatatcagttataattaatgtttactagaataaatgtaaatattttaaaacatacaacagttccaagaacatgtgatttccattttattttatgaaacattaaaaatccacttgtccaccccattaattataacctgctcccagccctgacctgtatataattcctcctgacataaattggaacaaggtgctcagaatagaagcagcctacaccccaactgggctacaaaatgtcaagttcccaaacctctcaaaagtgtaacctgacattttgctaagattagagacagtttatgaatttaaaaagagggcttaaggactcaccacagttaaacctacagtaactcctgaaatatccaaagtaaataggactaagggagccctggggacaccaaaaccctgttagaagagaaggaacagtctttagtgggtggtatttctttgcagaaaataatgtacatgcattcaaccagaattaagaagaatgcaacaataaactttgaggcttgaagccctctagagatctaaaggagtcatgaatgggccatgtgaaatatttctccttttgctacatgtgaatgattgaatttatactgcccattaatcctaaatgttgaaggcaaaaaaaaagagagagagagagaatggctaactttttaaatagtattcttcttgacatgaatataatatgtatttattatacatatgtataatgtatattggtgaatatttataacattcccaaagagcaaaacacctatagaaggatctaaccgcaaagaagcaacattccacaggttgatctttctagtcattttctgtacctcttagccacaaaaatgggatcagactttacgttttgttttgcaagttgttattttaaatataatatattgggtgatttttcatgtgtaaagattcttctgacttttcaagattaatttcaagtaccttttagtacaactaaagtattacagccaccttccaaatcaaatagactatataagctgaagatttactaaatattaaaatgttagcaatttttccccattataacatgcactgtcaataggggcaatattgcccccaagagcgagaaaactagttctcagtggcaaacaaacaaacaaacaaacaaaaaaccttactctttttatgcacaaagcacagatatacataaatagatttatactatatttgtggtattaaaatttcatgcaaggagcaattagcaaaaaatgtttcaacaggctccttgtgacagggggttgaaaatgaaaataggttgtaaacactgcactacagcatcagacttgtaaaaagtggccttcatattgctagagttcagaagatgattttttccattttaaatttatcaaccttgaatacatttttaactcatttcttagttgcagaaaccaaggttccaagcagcagatttttggagagttaatgttttgtgataaccccatggtcagcacatgtgatatctgccatgttcttactaaagactccttggggtctgggttaggaggcacatgttgagtgagaggatgttttgagggcagatgaacacatcatctcagaaagagctagggcctgctaagtctgcatctcaacatttatcagctcttgctctgtgctgccctcttgtgatgtctgggcctccagtatgccttgatctcaaaaccttcagttgccctaaattgatggaccacctgccttccagtgcttcttggcaccaacaccaggagatggtgaaggaaagaagagaacaccaaaagcagcagatttccttagaggaagaagccagtgtcagaagaggaagaaaaagtcacaaaacttcgctttggccctttaaccctaggaaagggtgggccaattttccacaaagctgctgttattacaggtcacacagctcaccaaggagcaaggcaggagctgagattcttcatcaccttctgtggtaggcagactttctaaaatggcagcccaaagatgtccacctgaagccctggaacttgtgaatgtgacatcactccttggattgtgttgtgttacagagcacagttgatgttagaaagggagatgatgcaggtgggcctgacctaatcacatgaacccttaactgctgagaacgtttcctgactgatgaaagaggaatttagagagattctatgtgtgtgaaggactcaatgtgctgttgctttgaggttggagatggccacttaagaaggaatgcagatgtcccttagaaagagtggaccacagcttatagctatcaaggagttcagtcttacagctgccagagagtaaattctgccaacaaccagagcgagcttggcagcaaattcttccctagggcctccagataagagcttcgtctggccaacagctcgatttcagtcttgtgagaccctgagcagagaacacagctgggccacccagacttgcaacctacagagccacgagctaataaatggggtgttggtttaatctgtacatttgtgctaatttgctatgcagcaatagtaaatgaacacaccttcccttctctatgaccatcctgacgggggggatcctggcaatgtctgtctcctagatcacagattctggtgagtgacaatcagttcaaatacagtatccaatcccgggtctctgactgacttcttaacccttcaagaatccacaataagtcttgccagacaagtcctagctcttgacctctgctctgaccaactgtcccttaggaagattttaatcaccttccgcttaatgatcaatttctcagggctctccgctttcacaccctctaccacctggcttatttagtgcttagcatcttctccaagtcaagcatccatctggtgtatttcactctggttgtcttttacctgcttagaacttttctttctacatctagaacgtgttcattctgcctcttcaaatctccaatgcccttattttcctataatgggctgctcaaagattatgtaagaagaaaagtgaaagtctgaatactcttccatgtgttaattttcctgaattttctataggggaaacagaaacagtgatgatatgccatgatcatatgctatggtggaaagagaaggaaaaggattaagcatcagacatggttgaatgtgaaactttcccagtattttatcacctctgcatgtttttaaatttttccaggcctcatgctcctcatttgtaaaagaataatagtaatacttaactcatagagctgcaaggaggaatgaaaatggtaaagacccacataacagaaaccagcacgcacaaacacttaaatatcactgtgagaagaattgaggtggttgtttgtataaaatacttccaatttttcagaggctgtagctttgtaaataatctttttatctcttctattatcataagaacaaagccattgtcacccttccttaagacagggtttagccttgacagttagagtattgtgtaacatggaaacaatgatttgacattagaatgctgtatccattgctctgagaataaagaaagtgagttttaggattaggaataaagttcttcagttgccacatttgttaggatatttctgggttttctgtaaagttgagtaaaccctaggccccatgaaggcagggcccatgcttaattcatcctgagtatctacagggtttggttgaaaactgtgtcctcagtaagtacttacccacttattcatttatttatgcattgaaaaatcagttaaagagtaaaatttagctgggcacagtggcatgcttgtagtctcagcattttgggtggctgaggtgggaagatcgcttgagcccaggagttcgaggccagcctgagcaacatagtgagaccccatctcaacaaagaaaaaaaaaagagtaaaatttctgctgaaaactgtggtgagctcaacattttatttttttgaattctccttatgttcctattgaacatttataactttaatttttcttctaattaataaatcttaatacttctctgatagaaccaaaggggatatttggatacttgggggttggggaaggtgggacatatgctccccaaaatctccaagttcttcagcttctgacttgtgctccaacctgaaaataaacccagaaagtgtcatataaaatggccaacatatttccaactgttttcttccttttgtatttcccactcattacccaggatgcatttccagtgtcctagtggccctgtcttacaccaactgttgcttcctgcttctgaacatcagggactttaaattccagatttaagagacttgcgtgttgaaaagcttttctctttctgtaaattacttgtcattaaaataacaaaggatgcactcattagtcaaattaaagatcatctatctggaagtgtgtcaaatgcagataaagtataaagaagcattgttgatacttttttttttaaatgtggacttaatgaataactttgctgttaaaattcagcagccaagcgcaatgaaaaattcccatggctttaaaattcacagctttggcagacttcttaatggacaaagttcaagagattcatagcttccctaacttaaaataaaaatccccaaaccacacaaggtagcattattatactctgaatactcttaagaaaaggtcttattagctgatgcttcataattatttgctaaaaaagttgagtgttataatttagcctctcactagcttagcctttagacataatgtagcattattgctttaagttttatactggcttaaggtaagtaacgtgcttcccaacaacctgctgattagtagagtccctttctcagtcattaccctagagcagggttctgcaaactatagaccacaggccgcctatgtaccaaatccaggcctctgcctgtttttgtgtggcccacaagctaagaatggttcttacatttttaagtggttgaaaaaaaaattgtttaaatattattttgtgacttgtgaaaattatgtgaaattcaaatttcagtgtctataaataaagtttttttggaacacagttacctccaattgctttatatagtctatgtcgagctgaggggtttggacagagactgcatggccacaaaacccaaaatatttactgtctggtcctttatgaacaagggtgctgacccctggcctagattcatgctctataagaaccgtacaaatagcttgacactttctcccctaatagtgtggggctgtccatagatcctggtagtcacatgatcctgctctgactactgcccttgtcacatatgcacacagacatatacatacacacacacgtacgtgtgcacacacatttttttttccaattattgggaatggggaagaaggagaatgactaatagccaagcctacccctgttccctagggttgtgggaatattctgcttgttccctttggcgaaatggaattggagtttttgtttttgtttttgtttttgtttttttttttttgagacagagtctcgctctgtcgcccaggctggagtacagtggcgcaatctcgactcactgcaagctccgcctcccgggttcacgcccattctcctgcctcagcctcccgagtagctgggactacaagtgcccgccaccatgcccggctaattttttgtatttttagtacagacggggtttcaccatgttagccaggatggtctcgatctcctaacctcgtgatccacccgcctcagcctcccaaagtgcggaattggagtattttaatctgggataaaatctctgtaacaattaagcaaatagtttctgacttttttttttttttttttaccaccaatgaccacttttaaaaaaatttttaaatgcttggatgctatgcttatcattcttaaaaacagctttattgagatacaattcacacattacaaacatccatttcaagtgtataattcagtgggttttagtatattcagagttttgcaaccatcaccactacttaattccagagcattttcatcactcccaaaagaaaccccatacccattagcactcactccgcattctcccctcccctatcccccggcaaccacgaatctactttctggatctatgaatttgcctcttctggacatttaatataaaaagatcatacaatatgtggccctttgtgactggcttctctcatttggcataacattttttaaaaaaccttttcacttttaacttcataaatcctcaggtttagaagtatttgataaaacaatcattgaaaaagtaattatacaatatcttctgggtttttcaaaacgctgaaaaaagcccacaaacttttcttacagtccctagggatgcctatgagtctgggtaatgccatgtaaggcatcattctgccaccacatgctcattctatcatttactaagcaaatatttacagagcacctggtatatgccaagtgtttctcaaggtgtggaacaagacatgcctctcagtttcagatctaagctcttcgcaaccttccttttcattagacactggcttgttttgccaacctgtaaacagcatattgccaacacactgtgcctgcctatatattttccagacttttagtattttatataaaaatgaaaaatgatatttcttaaattattaaaaatgatttaagttgccttcaactttccaagtacctggaaaaagctcctgaatcctcatccccttcttttcctacttatctgcccacatttttgtcttttcttccatcttagaaccgcttttctctttgattaatatcctaaatcctttagcacatgacaataagatattgcaaatagccatggggtatcagacaagcaaagaaacaaaattcacactttggtcattcatgactttttttcttagtatctagctagatgtctgtcatcattgttattgctcactcactagcaaaggttcagaatttctattccagaggtaaactaggcaaagtctctacaatccaggcagagagagcttaaaatagtggcattaaggtcactgtgtattagaaactgaatggtatctctttcctctaatctggtgagtctctcttatgaacagttcttttaaatgttggacatttgtacttactaacatggcttgatcctaaaggatagagtccaaatcaagcacatctgggcatatttaacctggaaaaaatgcccccagaaggccatgttagctttgtctttgaagagctgtcagagaacagagtaactgcacgtgttctgtgttgtagagagggggccaaacaggggtaaaagctatagggagagagagatacagatttcatctaaggacaaactttgtcactgcaaatgatgtctctcattggaatgagcctcctgaagatcccctgttgtgctagcattcctgggggccattagaaaggggttgctggtgatatgacaggaattcaaccaggataaggtttgagaccaaagatctttaactcccaacgatatagattctgtggcaagggtgatgataaggaacccggctggggagaatttttggcttaaagcagctacaatggttcaatcccaaagattggtgcactttggtaagtaaaagagatgatgtcttaatgccaacggtaacatactttttaaagcatttatgcagcaatttaacaaatgaaaaggaaagcattagttaacatttatagttaaatgttggagatttttaacctgtccagatattcaatattatattccttaaaaaaaaaatatttgagccaaaggctaaaaacagtcttttgaaatatatatatttcaaaatacatagacacacatgcataaataattagtctttaaatatagattcttcaaaagtattatatgcctgaacttgctggatcattagacaagagcggcatgagaaaacctgaaatttaaaaacacaggcagtatgtactttttacaagaaaataatgagccacagggaggaacctatcttgacattaattatgaagaatataatactttaaaatctagcaggacttcactgccttagactagaattaatcagaagttctcttcatttcttgaaattatgttttcttggttcaaagttataaatctcaaagctgtatagtttgaaaagcttttagaaggctttgttgtcagaaaaaaaagggattgcctctgctatatacatttttaaggctgacaattaaatattttctcatattgaatatgctatcttatgttataacttgaagggctctgatgagatttagtgccagctagagtatctgaaaatccctacaatttcagttatgacattccattacatggaagtgccattttatcccaaataaccaaggttacattttaaaattttactttccattaattaattcagcaatgcacatatgcaacagataggtaagttttgtgccaggcattgaggaaaattcaaaccttccactgtacaagtttcaaagacttattcacagagttgtttaacaggattgccaaaaaattgaagtctattttttttctctactaacattttatgtacttgctaatctgcctgtcggctcaatctgcagcttttgagaatgctcagctgctgttataacctcagtgcatcaactctaatttgtaagaagatactgtaaccttaaaaggtcaccttatatattccttgcacatattggaagaaaggcaaagatgagcatgactggggattaaagtgacattattaggtttatcctaagaataacatggcttctttaaaatatagtttgtcaggcaattttggaaattagagatatgttatttggggttctggcaactctttgctatataactctaaaaattaattaacctcttggtctatagagaacataagggctctgtaggaaagggaagtgtgcatgatgttactacatcacagactttaaatgaagtcaccaggagaatgcatgcagttataatgttatcacttcacagagactttctggaggaacataaactatatgaagaaaatttgtaccatttcctctaagaagggtgattttagcctacacaagtaatttgtattttcactttagaagttaaaattcctctttgtaatcctataaacaaaggaggatcattttcctggttcttatggctataatgtttcttcctccaatgccttctctcaacataatctactaaaccctttgggcatttttaaaatgtgcattttcaaagtatttttgagtattatttgccatgctatgaaactaatacattttttaaaaagtatcctattattttgggggtcagtctgcatttcagtgtattctttcttcataaattttcttattaaactcatatacttccaagaggctttgctgtattgaagtgttgcttgagtttagtaggctgggatcataaatgcatagaaaagaatgagaatacttcaaggtgcaccttcctctagaaatagtgatacctccggtcactttataaatctctattcctgagacaggaatgcctcattctgaattggcttagcgttcccgggagattcatattacagtacaactcaatggcgtattttactgtcagagccatagataacagtgagttcatgataactactatccaaatcttccaaatgtaacaacttaaagaatgaaaactaaaaccggaatttaaattgcacaactgatacaggaatattttatttttacatgcggttataatttattcttttttcaggtaatttgtaatttatatataaatataagatacatattttaattctaatacaggtaagaatatgcaacttaacagtatttcaaaaaataactattttcaccttattttaattctaaagtagaaatatatttatataccaaatgtaataaatacaaaatatattatttatcaagtaggggtaaatttataaagttaaaaaatacataacattttctataatttatataataattattgttgccatgtagacataatttaaattataaaacactatcatattttcctttgcctgttttgcaattctttaaatgtcttttaaaacctattagaattcaaagataaacacattgaatcagaggaagatccaggaattgtgccaatttctctataaaattctctatgcatatggagatataccctattttatgaggtattttattacctattaaattttgtatctgttaaaataatcatgatatctaatataagtgataaaacatcattaaaagtaaaacaaaaccaggtatgcatgaagtttgcttttcaattatgtgtgttcaatttgtgttttattttattttgttttgttttgttttttgagacaaggtcccaggcgagtgcagtggtgccatcttagctcactgcagaactgacctcccagactcaagcgatcctcccgactcagcctcccaagtagctgggactacaggtttgcaccaccaggcctggctaattttttatttgttttgtagagatggggtctcagtatattgcccaggctggtctcaaactccctggctcaagcaatcctcccaccttggcctcccaaagtgctggagttacaggtgtgaaccacaacagtgccagatccaatttgtattttaaagcattgaatataagctctttaagaaacaaaggctgatatcgttctctgttaaccactaatcttcagccataacttgcagaaacagatttagagattggtagttatcagaaatgaacaggtgggcaccaaaacctgatccccgctggtaaggagattcttatcaagtttcagcaaacccagtgaggtaacctgaagcctgagattctccttctcttctgtctaccccagtgattctcaaagggaggtttattttgcccccagtagacattttgcaatgtgctgagacatttttggttgtcacactttgggggcatgggagtgttactggcatccagttgcttaaggccagggatacagctaaacatcctacagtgcacaggacagccccacaaataattatgaaaccccaaatgtcaatagtgccaaagttgagaaatcctgacccgggagaatctagactggatgttggggaacatttgggattgacgcccacagagccagtgtatgtatgtctgtgtatatgtatgtttgtagatttacacacatctacatgtatattgacaatgaagacagatcatgcccctatttaatttatgcaaatgcaaaggcaatggaatatgttggaaaaggggagaggaatttaaatagtcttagcaatttttcctgatacctaatgtgtctattcctaaagtgaagttaggtgttggggcgtgcatctgccatgtcttgagcaagtaacaattctctgagtgtctcagagtataaattgaagcccagtctaatgttcggatatattttgcacaacacagtttcttttttgctctcaatatttcagttaaggttcaacaaaaaaggcagcaatcatagatatttttgacaattcagtcatgtaccaagataggcccatattatgtgtgagaattttacctgggaggtattgaacacacccaaactggattatgaagtatcttctgcactttttgaaaaccaatacaaatgagacaccactacacacctaccagaatggctaaaatgaaaacagggacaacaccaaatgctggggaggatgcagagaaagctgggtcactgatacatttctggtggggatgtaaaatgattcagccactctgcaatacgctttggcagtttcttacaaaactgaatgtgtacttgccatatgacccagcaattgcactcctgggcatttatcccagagaaatgcaaacttacagtcatacaaaatcctacacacaaatgctcatagcaactttgtttgtaatagctccaaagtccttaaacaagttgatgattaaactgtcatatatccacaccaaggaacattactcagcaataaaaaggaaaaaacgactgatacatgcaacaacttggataaacctctagaaaattaagtgagcgggaaaaaatgtcaatctcaaacaattgcatactgtatgattacgtttatattcttgaagtagcacaattatagagatggagaacagatgattactggtttctgggggttagggatggggtaaggggtgggtaaagggtgcagactgcccagtacatttttttgcaacttcctatggatctgtaattatttcaaaatacaatttttaaaattatgtttctgtaacaacacagccctgggaaacaagatcacccaaatggtctcattcacagtggtagagttgttttaaagaccagtgttatattctcagccctcagcaccatgccctctaaaatgcattttttccatttctaccttttgtatttactgctgtgtttatttttttgttttaaagacagaaatacataaacatgagtataagtgtaattttatttctaggtatagctgtaagtataaggtgtgtaacattgtaaaagagtttaattgttgtaaagaataagatagatgaaggaaaaatatgcttttttggattataatatgaaaggtagtgataagtgatcatgtccatttaatactatttggtgttgttttagcatattaggataatttgtccgaaaagggtacatttttagcaacaaattagttttcttacattacagggatatttatacatatacatgcacacgtgcatacacacacacacacacacacacatttgtctaaagagatgcttttgaatcattacagccatttcagatattattccaccgtgtgtacatatgtgtatatttacatgcctctgtgtgggtggatgtgtattcattcagagggtaagaggtagaaatgtccataaaacccagccttctctgaaaccttaagtttgtacctaaaaaaagagaagttaacctaacatttttaagtgcctagtatgtaaccaatactctgttaagtgctttatatatcatttatatatataatccttcatttagtgattattctataaaccctgtgagttgtccacatcatttcaattttacaggtgaggaaacttgggaagtttaaggaatcaacccaaggtcacagagttaagatgtggcacgttagggtctttactcgagggtctctgatagtgtgcttctaagtctactgccgggagtgattctcttactaaatagtagttttatcattgtcaaaaaaacccatcaaacatcgttgtactagacctggcattttctttctttctttctttcttttttttttttttttttttgagactgagtctcgcactttggcccaggctggagtgcagtggcgcgatctcggctcactgcaagctccgcctcgcgggttcacgccattctcctgcctcagcctctagagtagctgggactacaggcgcccgccaccatgcccggctaatttttttgtatttttagtagagacggggtttcaccgtgttagccaggatggtctcgttctcctgacctcgtgatccgcccgcctcggcttcccaaagtgctgggattacaggcgtgagccaccgcgcccggccttctttttgtttttctaaacagaggatatgagcagacattgcacaagaaatgcaaatagaccttcaacacatgcagagacactcaacgtcactcagaagagaatgcaaagctacacagagatgccgcttttcagatatcagataggcaaaggtgcacaagttggacaatgctctctattgatgaggctctggggcagtgctctcacacaggctggttagacaatgttatttatttatcaaaattagaaactgcatttgccctttggcccagcaatcccacttctggggatttttaatacagatacatccgccccatacaaactgatgaacacaacgtttttcagtgcacattgctttaatggcaaaatattggacacactccacgtgactagtaggggaagggtcaaatcaattatggtacatcgtcatagtgcaatgatatgcagttttgttttgtttttaaagaggaagctctctgtggactgttatggaaagatctctagggtatactctaaagcagaaaaaagccagggtgaagaataatgtatgtgaaaggccactatttgtgtaagaggagggaaatatatttacatttgcctacaacaagcagaaaaattgctgtagaaattgatatcacaacaggagacacatggtatactataattcacaactttgggcagcttgggaatgacgatgtttacataccaattagggactcaagaaatcctataaagtttttcttcaggatcctagtattcaaattagcataaggatcagacatggaatataatctctgaggtgaatgtttcaaacaatgtttgaagccccctgggatcacacaattaggagttgtgcctatctcaattactttcatactgtttctttacatgatccaatgctaatcaacaatttacctggttaaaatttagttggtttggttatgctctgaagaggacactcccttcttatgttttctgcactcaggcaggagacttgtaaaggagctaacaacaaagggatttttaaccttcaaagccttaattagaaaataagagcaaatggtacatttttaaagaggaaccaggaatacatattcttgtgggcttttgcctcattacatttgttaataaggaatgccaaaacatgtgcaccaaaaagcgttcaaggtcttttggtagtaaattatacttgtaaatttgatgtaagttgatcacttgaagaactcacactctttgaagattagaattcataaatgtatgaaagaattaaatggttctttcctctagtgatataaagtattaaatgacagaaaaaaatgtgttcgaaatcaactgcggaaataattcattttgaaaagtattcaataaaaatgttaaatgggaaaaatatgctaagcccgtttctgctggatgaagaagtaaagcagaaacatgaaaagggcaaatttaaggatgatgggctgggaaatgtcccatcagcctcacagttttactttttgttattcaactatggcagttctaggcccagtaatctattccatccccataagacaaagaaaaaaagactaattctgatcagcagaaaactggatggcctctaggaaccttcaagagggcagtagctccggatcaaggagaaatgaatgcctttaaagaggcatcttagattgttttgttaatacataaaatcctctctctttatcatgcagaagtctcatttcaaaaggaaaatgcaagtcaatgaggattagtttggctcctcagaggtcagaactaaatatacaaaaactaataatatgacactgaaataaacaagaatgtggaattgctcatccgaagggatgatgtaactaatattgacataatttccaagcagaaaagcaaaactaggtcaaagcacgatggcctaacataataagcatttttgtttccagatttttaccatgtaggctgtgtctgcaggcattaatgtcttctgttatcaatgttcggggctgtcacaaacaattcatgtcttatcactctttgttagttaaaccaaaacaatgtagtttatatgtgaaccattcaattctgacagctgaaatgttagaaagcggagaaatattcagaaagtgtctcttccagactgagaagcatcaagcaataaatattcattatctaatagtctatcatgtttttatctactcagaaagtcatacccctctcaattaattattatgactgttttccctcttttagtcagagccgtacaaaaagggcagcaacaatctcattaggatttcactttaaacattgaccactgaaaaggaactcaagtgaatcactcaccaaatagccaatttttctctaccgctttccccatcatatgttgactaaaagaagtcacgctttcttctctcgtctatttgttccattttaccttcctgcactatttcctcaaagcacagctgattaattcatgggctaaatgactcatctcattccctaaactttcttttatataaatataatcctcctagtttttgctgtctgacattttcatacttaactaaaatcagagcaaagaatatacacataaaagaagcacaaaacccaaatataagatcatttaactatttggattttttggacagtattttccactaaagatgatgtagtctttcctgagttgcctcattataaaccaacattccattcaaattgccttggaatttattagcatattgaattatagcacatgacctgaaaacatccaaattatatcttagtagaaggcatgtggtacagtcacaaaagagaatgagatggggagtctagaagacttagcttctaggtgtagaacctaagtctccctcataccttgctcccagatggagggtaaagtgtttcttgtgctaaaacgtcaacccagaaatgctaaactttaaccagtattcttagtctggattcctaatgtatttcgtacagaagacttgatcctatgtaagtaaataaatctctattaataatatttggtggtgccgtccatctatatattgctttatttggccattcatctacttattattaactcagcagggcattcaatgaattccattttcccagtaacatcccccttcctccgaattgtttggggaagaccacttctaaatacacacaaccaaagcaacactccaaaacttgacataggacagataccacagtctaccgcatagaccctttggtaatatattagtcctgttgtttccataaactattaaatgtccctgaaatttctattttgtcatttttaactataacttctggtctgttacacctaccagcaatgaaaatgctttgtccggcacaaatcttgaacttcactatgaaaaatgtggccaccatctacatggagaaggcttcagtcttctctcagacacgctatctcagttctggagtaaccttgggcatgccactcacctgcaaaattaaacaactgcacatggacctaaggcctaaactatcaggctgggttcaatgagagaaagcagcagattctatcttggcgattaggctttgagctattggagggcatgacccatttcgtaatcatttctgcagaacaatcaaacagaggataagccaagctgcttaccatgttttgggttgtgttcttgcccagaacacaactgaaaggaatatatatatatatatatatatatatatatatatatagagagagagagagagagagagagagagagagagagacagacagacagacagacagacagagagagactatgtgtatataaatggactatatatatataaaaccatatacatatagttcagtaatcataacctatgctaattttctctactactgatctatttagtccttgctgtttcccggacctttctaatgccctttcttcttcatatcccttcggattttaaggagcattttccattctcttttttactaaaattcacccagcatgtgcctgtagaacacttaatgattcttattgtgtgccagacactgggcttgggtctggggattcaaaggtaattaatatgtgactcttgctctggagtaactcagttccaagataagcagacaaacgagtagaaatatatacaccaactcaaatactcgtgtggataagaggatgctacagctattttctttccatttattctaatccaagtagacagtgctcagcatacaaagagcatacttacaaacaacccaaacccacaaacgccataattccctctcaactgggggcctgtggctccctggctgttactcacaaagaccctagtgggtccagaagttcaggcaggttgctgagaaagaacaaatgaagaggtctgacccacgggcagacacaccagcaagttctgtctgccaaaggcatggccctgcccccaaatattgtccctgaaaggaaaatcatgtgttttgtagctccaggctccactgcttgaaatttccccaattaaagattcatcctaagggttaaagggataagagtcatgagctttggctcacccatattacttctttcctgccatgtggtagagaccattgactaaaggaaacaggagagtggtttggaggtggggaagggaagggtgggaagatgaacaattatgaattcactatatattaggacaggcctgggggagatgccccagtgagaccagaagacatcagaaggatggagaaagaaaggtgaaaactagtacgaacttcctatttcaaatattgccatgactggcctattaccaaaagtatgccaattctttctccttctgtttccatcctgtataacacagtggcatgtcctcaaaacacagaacttgatctcacattaatcagattgattatttttcgctggaaaatgctctgggtttcaaacaacaaactcctaaaacataaagtattcctagattggggactacctatgagttacttttctctattgagaaaaataaattactatttaataattatgagaaatctgctttatgtaagaagtcataaatttctacaaatggacatgtgggctaaaaatcaactaaatttcacaattacaaatcacttctcaagtctcctaagttcagtaaggttttggataccatcagtttttcaagtggatccctacccatacaaatatagatattaatgagcatccattttgaccatggaaaaacctacattatgctactggtacaataaattgtacaccagatcaaaagttctttgagggcaggggccttaccaaagtcatatttggaacccagaaagtgccctggcacattaataatcacgtataatgtggcagaatatattaattctgtgagtgctcagtaaatgtcattgaatgatataagaaaggaaggacagcctttatattatattcatcataaacactggactgaatataagaccttcaacatccacttgtactacaaatgatcagcacctcttccatgtttactcagaacctctctttcatagcgcaaagcaggtaagttattttctttggtctggtttgttttttcaggaaagtcccctcttggcattttgttctgcgcctcaattttctgtgctcctactatcacctgacctcctggaggccattaaccatcctgatcttgtgtcaatggaatattttcctccagagggggaaaaatatttcggatccagatggctccctaatattgtgtcctttttagtttaaagaaatttttataacatgccagctcataaaactgggcaaacaaatttctagaacaaaaccgctgagctcacttttgtgtgaaatcaaaggaattgataatgagccagaatcttcccgataaactgccttacatgtaaacggagattagattgctgtttgacctggctttatcgccctttctttaatcacagcgtatttgatattctcttccttgaatgaactcattttcatagtagctttggtcacaagattaaagaatcgctaactaattgttccaaataagcagagcaattctctctgactctgcctcgggctccctgcagtgaagtccgctgcctgatcttccgaccacgggaacttcaagcctgacccctgcaggtagataactgaaatgcacacctctaatcagatcctggtctttcaaagtcccatcaagttctgaaaataaaaacgttcatacttagtacaatagggatattgatgatatttatatgatatattgtacttccttttcattgtataaattgcttttggaaagtagcaaccacttgtttaaaaataattaaattacgtctgcaagatactctggtgcgcttagccattacttctttttgcctattgagaaaaatccaaatgatttgattgaactgggatcctcaaatcatgtgggttaaaaatgtcctgatttgcccctacctttttctaatcaaacaaattactctttgtccagtaactaaatcccctcctttcaccaacgcacagcccaggttgccatagctaccttggatgtctatttaccacacaaacgatcaaagccaggagacatccacatatgcacttagccttaaaacttgctggaatgtctgtggataacatgcaactaccaattaacggatttgcttgtagcctatgcggtctacagccaagcgaactaaaaacatgactcaaaaaaattatttcaaaatgaccaacaaggatctttaaactgacagcaagtcttatgattataacatttgctgaaagagagatagcagagaagaaattaaaattttaacatatgttgaagacactgagctctataaaccatgtgcaaaaacttaaaacatctgttgaaagggaacatttctcagatgcatatttaaaattccagttagttactgtatctttctattagatttcataaaagctgcctgatctcaatgttgggagaaatgagaacagaactgccttttgaactgttaagagtctggactttcaaatgaaggaaaccatacaacatacttgggacacaatatacttgccagttacagaatgataagaaaaagaatgtcgtaagagagattctgttttaatccctagaatgccatttgagatcctaaacctgcacaggtagtctttctgggtgggtgagtattcatccccagacttgcccctaacttgctgtgtctctttatacttaacctttctctgccttcgtctcaccatttgttcaatgaggatcaaattgccacctcattctctcctggggatgtggcagagaataaatagatcgtgtttgtaaaggactttctaatcctcagaggaaagattaatacgaagactttcattattaagccagatgtccttgggcattttaattccaatctaaagaatgcagaacgggctaaccaaacagattcacggcttccttgaaacagcagcatcctggccttgcaagaatttagcagctacgtgacttactttgttttagtagatcagaaatacatcatgcaccttcttcccttagagttttttttctaaagttatcaggatgttaaaaacacaaaatatgtctagtaggcaattttgcctagagaatctgatttttcccccagctcaagaatgaactatttgttcttcttgtgtgtagggacaatgggtggcttgccatgtggggaggatatatgcagttgcgggaatgccacaggcaaacctgttgttttcggccaggcttctagaacaggtggccatgcttttccttttgcctgggaacagagcaaattccttctcaaggaaggttcataaaagtttcccgtttatgatcagagggcagagacaggttggcacatattttaaaattacttcctgatcaaggtgaatcagatttacacttttctttggcctaactcagccgtggccttaggaaccctcaaagaatactatccttctacacctgaagtggtggcttcaggaatgttccttttctgccaacctggcagaagcccaaacccctctgaatcttatagctaggcaaacagccttctaattctgcgggcaatttctggctacccagaatttctggctatcagtggcaggcaggggtctcttctgggctgccacaccagtgtacaacatttgtgcagccctagggacagatcactcatcagcaaagagatccaatttcattgctgagctgatgacacacaggtctgtttgatagttaaccctgtaaatccagctggagctgccgggctgagatgacaaattggctggtgaattcgactcaccctgcctggatgcaacagtcaggtttccccaagagaaactcaaataaagtagggattaacccatgccaataacactgccatctcattcctccctacattcttgttctgactgcagtggaacaacatgctagattctggaaactgtcctcgttctttggatgaacaatgatcctgtctctctccttcatctcctcccctgttccatcccaccctctttcaaagttctgaacaggccaaaaaaattagtagacatacgtagctgtgagatgaaaagttgcccattcattaaataactaaggagttcactatatgtgtacttgtacccctaaaatttcaatactgggctgttttccaacttcacgtaaatgccacaacaaactaggcatgggaaaaaccattccaagctgggggaagcaaaccttaggcataaggcacggagactgccatggttcctgaggaattgtgtgggaacagggattctggaaattgagctcagacaccaccgaggagaggacaggtggctctgcacaggatcaaataacttctttgttccagctaaggacctttgtcaaaaatgttttgcgttcctctttttccttttcaatcctttccaattacccttctccttccttttcctcatcccactttagtagacattaaaagtatgaggttggactgtgagtttgcagaacttaaagacgtcctccccacagtccctaccaaggcaagggcaattcattgcaagcagacggcacttgctcctccgcaagtgtttttctgcactcactgaaacttgccaagcctgcttgctgagcgaacaagcgagggggcaagaaggcggagggtttgcgctgaccattcgaagggggctctgcttcatctcccaaggctgtgggaaagggacagaaagttcgaaacccctcccctgcgctcttaaatggaaagctcacttcccccaaagtgtgcagggtggcgagcacccaacccacttagaagaaaaagtgaagagcttttccggttgcgatacagatgctaactttcccatccagatttattcagagctggtaaaagcaatagcattcctcttgaaatccctgcccttccaagcctattggcatgtttttccagccttgttttctccttatatgagtattgttcttgatatttaaatattgacataaaattcttccataactttgattgagttgtaaatcacaccctctccttggcttcctacatccactttttctttccttttcttgcttaacagcaaagctataaacctcttcctggactgataaggaattttatcatcatgccccagagccacagaagaagctgttggtttagaattcttttcaaagactcatttaagtaatcccccagccctttctccgctcactactttcagggctgccttctcacgtccagaagcaatacagtttccaaactgctagaacagaaaaacaaatttgcatttttctggaaggactgtctgtgctcatttcaagctggttccgccttctccgccagaaacacagtaagtgctcagaatgcgaaaccaaaatgagataagaggccccgtgaaattctttttcaggacattcagctgtctttattctagcccaaagcatagggtagaggcactaaaagctcgagatacatcctgcacgatacattccagcggccgcaaactggaattgatttacatatattctacaaactgcttgtaagccctttacaacgactgcctgacatcaaccacaattagaggcaaaagtgggggcgggtggcgaggaccagaccggggtggctcaggtaaaatgtgcttctttggttgtcttaggaaaatgcagccccgtctttccgccaaacgcatcgactacggccaggcgcctgctaacccagcaagctctccgcagtaacacgtcgcaggggtcccgggcggcgcccgccccctccgccgccagcgcaaccgcctgagcttacctgcctcatgtttagaatcccatgacccatccggcagggagcgagctgcatcggagcccgcgtcgcagtcttcagagcggaaacaccgaacccgacaggagcccgcaagacaaaagcaacccggcgaaatctacgggcagcaaagagcacgttttcgtcctctttttctttgatctgttgctacacgcactctgctcgagacaatgtcaagtttctcaaccttttctcccccagcctatgaaaagtcggtcgcagggaagcgaggaccgcctggctcttatttcaaatcagttctcagagacgttgtaggtggctggcttgggccgcggaggagcttcgccaatcagaagcaagggggtgggtcctgggagccagaaaggctgcctccgcgaggattaggggcgctttcgggattcaaatgactggaagcagctggaaacaatgtccaaagctccaaaagtaaaggatgagttctattcttatctaacagctctagttctgctaaaagcttaactagctaagggccttaaatccttgcattttaagagctccctaacagcattaaaacatttggaaggtgcaaaattatttcagccagaaaagttcaacactcaggacccaagggtatttttaaaaggatatcttgcactgaagccctacttttgcaaaagactggaaaggaaaccaaattgttatgagtaacaccttaactaaaacgaacaatccagaaaggagggtgttacctacctcatctgcatatagattaactgtatattcaatttaagaaaaataaatcttaatgggaacgtgcacacaatttttttgaaatgcagcaaatgaacaagaatctttacctactgaaggcccgaggcataatttcaaataacactattgtcatagaacaatacacactgacattttgttcagaaaaaaaaaaatttagtgcatccacctttctctatggtttggcttccctacagggttgatctgttgaacttattaacagggacaagctggacatcaccttggcaggattgcaggagagctggagaagtagttggcttcttagaaacaaactcagaccaaaaaaaatttccaaagtttgctttcttaactccatataagcaataacttttttcaactcttagccaacatgattttaatgtaaatctaccttctggatttcaagaaagtgcaagttgagcaaagagtactttgtgtagaactaatggcatattttcccccaagaaatgaccgcaattttgtgacgataattcaataaagattttaaatgtgttggtatcagaggaaaaaaaattacttagcaaataatgcattggtggcttcaggagtgtcagctgcatgggttcaatacatgtgagctctgcccagttctgtgaaaatttggtggtccgataactgggcctggaagcccataacgctagccccctgcctgagtagcctaaggagccacctagtgacacaaactgacttcagtccacttcttgtacttttccttgagagcccttcatatgatggagttcaggatttctcaatctcagcactattgacattttgggcaggataattctttgtcgtgagggctgtcctgtgcactgtaagatgtgtagcagcatccctggattctgcacactagatgccagtagcacccccacaatcgtgatgaccaataatgtctccagacattaccaaatgtctcctgggtgatgaaatcacgctttgaaagggtggttcttaaacttgagggtgcaaggaaacctctggggagattgttaaaaatgcaaatctccaggcccctgcaccaaaataatctgattcagtaggtttgctgaggagcctgagaatcagcattttatcccactgacaaaggactctgatttactttgagaaatattgcgtctatcccagccctaggtatgccccagccacaggacacaggaagctacccagggctcctgccattaaatactggagcttaatcccatggcacatctgtttatcaccttcagtagaagctacaactgcgtctgccttctgctttcatcacctcaaaggtaaatatgagctgggatttcctctctcaaggactgagcccttttaatgttccttccatttttattctcctttgactcactcaccaactatccaacaatctcaaatgtcaccactcattcgtgatttccccaaatgccccaagaaaaattaatcccttccatcttctatgcccttaaagcaaaatacccttataaaagaggtttcagagagcctatttgccccttctgccatgtgaggacacagcaacaaggagccactgatgaagcagagagccctcgccagacaccaaatctgctggcaccttgatcttggatttacctgcctccagaactacgagaaataattgtctgttgtttataaatgacccagtctaaggtacagtattttgttatagcagcctgaactaacacagtgccataaaatatgctgcctccatgtttcagaaaacctctaaaaaaaatgaaaggtggggatacacaaagtctttttcatttacaaataaacaaatggaaatgtttaaaattctgaatgaaataaatggtcctttggagaatgttcattgagtgaggatttgatccacctattagaaacagtgaggcccggtgaggtggctcacacctgtaatcctagaacttttgaaggccgaggagggcggatgatcgcttgagctcaggagtttgagaccagcctgggcaacatggtgaaatgctgtctctacaaaaaaaaaaaaaaaaaaatagctgggcatggtggtgtgtgcctgtagtctcaggtacttggggagctaagacaggaggatcacttgaacccaggaggtcgaggctgcagtgagcctaggttgtgccactgcactccagcctgggcgacaaataagaccccgaaaaaaaagaaaaaaaaataaagaaaggaaagaaagaaagaaaagaaagagagaaagaaagaaggaaggaaggaaggaaggaaggaaggaagggaaaaagaaaagaaaggtgaagtgagtaaaagagcttgctctaccaaacgaacagatgttctgttcccaaatctgtgattaaacatgtttgcaaatattagctgaagggatgttggaagttttgaaagctcttcttcaaaaaaagcagcctagtcgataatcttgttagttatgtgcgggtttggttattaacagaccttgtagcaaacctaacataggttctgggtggatagtcctggacaggcagcgctactcagacatggacaggcattgctgtggcgcccttggacgatacctaacagtatttgtgccacctctctcagtgatctcatagatcaaagaacatggagtgaatgtttgtgtaagtaaaaaatggctgaatatcagcaatttcacataggttattttaatgtgtgtcaggacacatcaaaagtcaatgaaaatcaagctgaagttgtctatgcagccacctggacagtgcccagtacaagtgcacagactttgggagctatgaaaagagcatgtttattctccctcagaggtttcagaaatccagttgttttattatcgggacagagggaaatgtatggaataccgtgttcgaagtgattagtaaaggtaatttaagttgacaacaacatgagtccccacttagaaaaaaaaatctcatctataattcttatagaaagtcacaaaaagagaaaaaagtttctacttcctgtgtacaggtactccttaaattagtttctttcagttggttaagggaaacaatgtggcataccacaaggatgggccaaataagacttggagtcagttttctgtgctgacttggtcactaactggctaatagacctcagataagccagttgatacctctaagcccaagatttctcaggggacaattgcacagcttgaataaattcatatattgggaagtgtgcccagtgcaatcgctattgcttgttgtgtaaatgtgttggatgaccaacactggaaagaagggaaaaaatctatgtagtcagaaatgtaccctaagcttgttgtttcctcactagaaaattaaggaatcaaagcaaatcatgtcatttttaatgttaattaaaccttactatttaataattctatgcttttaaaggtgaaatattttaacagcatctagtttgtcttaagattaaatatagcagattcttcattatctgcccttgagtaatctggtaaatggtttatgcatgaatttttaagatttttattttatttcatttaactttattacttttttaaaatttttttgaaacagggtctcactctgctgcctaggctggagtgcagtggcataatctcggctcactgcaccctcaaccgtctggactcaagtgattctcccacctcagcctcctgagtagctggcaccacaggtgcatgtcaccatgcctggctaatattttttactaatttgtagagatgggggtcttgctatgttgcccaggctggtcttgaactcctgggctcaagtgatcctcctgcttcagccgccaaaaatggtttatgcatgaatttaccaagggcttgttatatcctcctcctgtggtcaaaatctccactcccaattgaactttctacttcatttcaatacaataatatcatacttcccaagaataattcttcaatttctgtcatttattttttactataattttttatttaaatttaaagaggaaaattatttaaattaattattttttaagtgattgcctgtatcagtcagggctctccagagaaacataaaacaggcttatgtaactatggggtctggcaagtctgacatccatggggcaggctggcaggtgcggactctgtagacttgaggcagaatttctccttcctcagggaaacctcgattttgctgtaaaggctttaactaatggggtgtggcccacctacattatcaaggataatctcctttactgaagtcaactgattgtagatattcaccatatatgttcaatataccttcatggcaacaccttgattaacatttggttgaataagtgggtactacagcctagccaagttaacacataaaccgtcacaaggcccatgcccaaacatttgtatatccattgcaacaacaagcacagagtgtgtggtcagtcaataaatgtttactgagttgttgtgactaataataatattaataattttaaaatctccattagtagaaggccgtcttctttatcaataatgaaattttgctaatcgatttattatgtacttatcaactgcagtgctggaagttaagagctccattttatttaattttgagattaagtgatttctagctgacagttctttaccaagtcatactatcaatcaaatgtcagaatataatgcaattgttttcataccaaggctcaacatttttgcatcccatgtactctttctttggaaaccactcaaagatgtgttttagcaaaatgagagtgttaaactaagaaagataagtcaatgggacccagaaaatagaggaaccaacataaaaagaagtaaggaaagtccaggataataactacataattatcatgcagttgtgtgcagcatcttagaaaggccccatctaaattgtagcaggaggatggaggagtcctggagttaggactctgggggaaaaatgatactataggtaacatttgagggcaaatagttacacataaatataagcaatatgtgaggctattattaactccaggcaaaacaaaagaatgcacaaaaaaaggaagcattgttatagaacagtccttaacttggcagtgatttctgatatagatattatggcagagactactggtagccaatccagtattcatcttccctttgcttcttttcaacagaacctcagtttacttggggcagaaatgtgcccagctgaagaacatttcccagccccctttgcaggtataggtgatcatatgaaactattattattattattattattattattattattaaagactaggtctcgctgtgttgcccaggctggagtgcagtggctagtcacaggcacactcatattgcactacagcctcaaactcctgggcacgagccatcctcctgcctcagcctcccaagtagctgggactacaagctcacaccaccatgtctggtaggcctatgaaattttaatagaagctgctatgtgctatgtagggcttttgggaaagctatttaaagggaacacacactgtttgctctttgcccttcctggatttctccaccaggaatggttgcaatgtctgagggactggggcctttctgtaacaatgacgaggacagaacacctagtaaagctggataacagaaaagatagaaggatcttggatttctgatgacatcctggagcctccaaatgagccctaagcttcatgttctatgaaaaaataaattgctaatttgtttgagccaatgttttgggatctgtgttactgggtgaacataattcctgacaccattatattggaagaatgtggtattgggatgaggagggctaattcctttttgatcatatgtagaatgttaagaataatatccaaaattcataaaccaggaaagagcagtaaaggcacattatgggaaatatggagatacatagcagaggagatatttgccagttgaaagtgattgtccctagggtggagtgggatgggacagggattactgtttttcattaagagtctttcatacatttgtatgttgaacatgtattactttgataaaattaaaattagtttaaaataaacaaaaagatactctctggttattaaatcaatttcttgtccttaaagtcacttcctatgaactagcagtgttttattatcatctggcccatagatgaccagagtcgtggtagagcttcagagaaattatatgcctaatggtccattctgaaacccaagtgtaatgtgatcacgtcatacacatatgacctgattggcatttcctgtttccaccatttcagctttaatttgttcaaggcttatgatagtttttccacatgtaaccagagatacatatagacagttctgatccaaattgttttggacattcttttagatctccaggaatgaatattctatatccaagacaccttaataattcattagagtaatcgaaaaccaccttttgttcttattcctaattggtatcattcttgatttaaatccattttttgtgggtttttgtatgactaggaatagctggttactgtccttcatatttaaccattttacttcttattcttttatctcactttccttatatacgagaaagattagtccctcaaacctttaatattttaatgcacaaagctgatatttaaattagtcttagagattaaaaatattaacttttatgaatcagatctctttttttgtatgttagaaacaagcaaatcaggctggatcattgataagcatgtggacataaggaggtgaataaaaattttaatcaaaagaagctttgaacaggatttgcgctccttgcttacaaaaagtcaatgctttatcttttagattggtacttaaatgaacagaaagattgccaggatggttgtgttatttctgattggtgaaaatcctctcccacttcacacatacctggatctaagatggtagtaaagataaaaactacttaggaatcatggtttatgtgtcactttcctttgttacacacagatcatggtgtgtgtttttttttaacatttttaatggccaaggaaataatatttacccttatttccttataactaggtaacttgtcataagttttttttttctgttgagaaccacttatgaaaatcaacacatactgagataggctttcttatattattcccctgatgcaaaataaacatatttagtcatggcaagaaaaaaatgcaaacatgggtatcagtgcctcagcttttcccatatttattaaagaaatctaaatatctgagaaactacattcaaatgaggcttcattttatttctcctttgaatcattaatttacaaaaggaagggcttatattgcctgtctacattatcttataaatagcaatgctatttaatattattttaatgtgagtgatttaaatagcatcatacaatgaacaaaataactattctttttcatagcattatttaagttgtaccacagtgccctagtgatatttgtcctaaactatatctgtgtggaaaaaaaagataattttgttatggtcatctttagaaaccaaccaattcgcaaataggtggacttttcttcaactgggcaaattaatttagcccaattaagggaatttaaaaccagctgatacaccacacactgagaggtctaatgagataaaaatacgagtacctacattacagagatgcacaatacaatataatatgatataatataacccaccaggaggtatttgtgctgaattaaaaggcaggcaattgaaaaactctcgtatctatcatggaccagttatacatcagtccctttttggacatgcaggaagtgtacagttggtatatgggacatcggaatccatctctcaaactcgagaacccatactctttccagcagcatgtggtgctggcaccctagttcagatgcaggtcccctttggaatgaggctcaaaatgcagtatgcccatgactcatcacaaacactccttcacctcctgtgcctcaatgggggtgatggaatttaccacttagatggttctaagatccccaaccacaatctacctccaaaagtctctcatgttgcaccttcaagatgagtcaggaatttgccattacatttggaagcaaactgaagcactttaatgattttttttttttttagacagtcttgctctgtcatccaggctgttgtgcagtggcgtgatctcagctcactgcaacctctgcttcctgagttcaagctattctccagcctcagccactctagtggctgggattataggtgagtgccaccatgcctggctattttttttttcttttttagtagaaacagggtctcgccatattggccaggctggtctcaaactcctggcctcaagtgatccaccagtcttggcctcccaaagtgctgggattacaggcgtgagccactaagcctggccagcactgtaatgatttttaatcaccttaaatggctctccaaatttgggctgtgttcatccaatcaaccagaggtaggaaaaaacaatgcatttgtctgttaagggagtagccctcatggaaaaagatgttggtattgtgctatgcagaggaggatttggattttagggctctttgtctaggactgtgaatgaggttttccttttccattcagaattgctgaatgatgttcctagtggaatacgtttgtgtgattcatttccacagttaggaatgcagccttagagcacttttctttattcagagctaattggtgcatcaatgttctagccatcgatttcattagcaacatatagatagatatctgtacatctctatgaattgattttcatcactcccagggaatccaaagatctcaagcatagagacaagtgcttcatataagaaaaagaatcggagagactctcatgccttaaccatatgctaacaaagatggtataccttctttatgccagaacggtcataggtattcagtaagtatttatggactacagctataacaccctgaacatgcctgatcatgtcagtaagtatttattgggtgtctactatgtgccaggcattgttctaggtgctgacgatacagacaggtacaaataggttaagtgctgctgtcatgagcataccttctagtgaagggagatagacaaacacatcaacaaataagtagaaagtaggtctgatggtgataggggctattgtatgtggggtaaggagtgtcaatgggatgaggagtttctatattttatagggtgatattttagcaaagtcctaaggaagtgaggaagcaagactttcaactacagtgatggatgggggcagagttacccgggcagaggaaacagtgattgcagaagctgtgaggccagggtgaactcaaccaacgcaggaagcctatgtaggttggagcagagggaggaagcactacagtagtaggagctgaagtctcaggaatgtgtctgagggtgtatgtgtgcggggggcgggggcagtggttgtgggtgggtgttggtgaggcagtgtttgcagatcctgtagggtctagtagatcactagaaggatcttgggttttccttggagtgagatgggaaggtttcagagctcaggagtaacaatatccaattgatattatagagctcagtctgactgctagacagagagcagcctgcaaggcaggagatgttaagagatgatggtggattgggacgggggtggcactggaagtggggtgacttggggagttcctggatagattttgatagtacaatgagtgtggcttgctgatggactgtatgtgtcagataaagagcagaaacgaggtttccaggttgtttcctgggacagctgggagaatgaagtcactatttactgagatggggacaactgcaggaggagcagttgataggagggaccacaaccttgcttcagtgtcctgtgggaggggcagtctggaggctttgtaaaatcatccagataacaagaaggtccagggatatttggatcatgcccaaaagtttatactatacatggaaaaaattgaacataaatacttaatttattattcccaatcaatgcagtatagcactgtggctggcagcactgatgctggaaacagccttagtccaaatatcaatcctgtcacttaatagttgtgataagttggcccatctgcttaatatccctcaaagttattgtgagaattgaggtgatttgtttaaaaataatattatttaacatttattgaatgcttattagaagccagacactgttgtgagcacatttaatcttccttcaccctatgagaaaaggtactaatattatccccattttccagaggagaaaactgaggcacagagaggcaaagtaacttgccaaagtcacacagctaggaggccatagatactagtttgtgcactcaggctgaccagttcctgaaaacatgcccttaaccatagaactatgaggagaacacagcacatagtaaatactcaaaaatagtagcttgtattatgatcaggtaactcataaaacaaaaacgtcaaagagtcagttgtatgtttatatgactccacttgtaatcattgcatgactcagtttccatcgtgcattgctttctccagctctattttgggtacgtagcccatattcttccttccttgatatgatgaagtctttgctgagaaaatcagaacaaaatatttatcatttgaaagttcgccttaaaaatgcccaaggcacaggaatccttaagagtcataaaatccatcacaagcatggagactttttttctgtcattaatgtcatttaggactgtaacatatttacctatgtcccagataccgaacaggaagcaattgttcagacacacttctaagtagctccagggcaggcaacaatgtctgacattagctctccatatttgtctttcctttgaatcatggagctcacccttcagccccaaagtgctttcagatgggaccttgctgagcgtctgcaccttatttctttcaattacgcttgcattgtctggcctaatgagtttccaaagctagttttcattttatttagggcatgttttcagatgtgttaaattaattggtgctaaataaaaggtaacctgacccctgaagcttctagcaaatacattccattaccaaatgtactattctaaccctcatatgtctaaaaaaacaaacgtaaatgagctgtgctgtacctgtttcttcttgttgtgtatcttgggcaagtcacttaaactctctgagctacagttcccttatttgtacaatggaaccattagttgctttggctgcccattgaaatcacctggaagagatttaaaagatacgggtgcctgagtcccacccccagaaagtctgatttaattgacctgggctgggccttggagcagagtttttaaaagctaccttagggaattttgatgagtagccaaggttgagaaccacaggtctagatcagtggttctcaaattggagtgggcatcagaatcccctagagggcttgttaaaacacaggttacagggccccaccccagagtttctgattcagcagtctggggtggggcctagaaatttgcatttctgacaagttcccaggtagggccgatgctgttggttttggaaatgcttctgtatatcaggggttggcaaactcaggtactccagcccaagcctgcccaccacctgtttttgtatggtccatgagttaagaattttttttttaacattttcaaatagttgaaagaatcaaaagaattatatttcatgacatatgaaaagtatgtgaaattaaaatttcagtgcccatagataaagttttattggaatgcagccatgcccattcagtctaccattagaccaagtgtgggacctcatgtaactgcacaggttgtatgcccaagaagctggctctgactgacattgactaatttaagctccaagcttgatgtgtttacctcctgaaggggatcagaatatgccaaccccaaatatgcctctttggcataataattattttgagctaaagtcaaatgaaaatcaacagctgtcggaagagttctctgccctccctctatctgcctaaaagcagaacatacatttccctttgaagaaggtgccccctgtaccagagagagaagaatgacttttatcatagaagatggggagttgataccaagaagagtttgtataaatagaccttagtccttattgttcattagttcccctatatatttcctagtcattttcccataatttattatcccttgaagcccaaaccctctttcctttgttaaaagggtatgttaaaagcccctgagtctagctgcttctttgtgttttgctccttttgtgtgaactcttgtgtatgtacttttttttctttttttgagacaaggtctctctctgttgcccaggctagagtgcagtgatgtgattatggctcactgcagcctcaatcaacctcccaggcccaagcaatcctcctacctcagcctccagagtagctgagactacaggtgcacaccaccatgcctggctaatttttaaattttttttgtagaggcagggtctccctatgctgctcaggctggtctcaaactcctgggctcaggcaatcctcccgccttggcctcccaaagtgctggaattacaggctagagcttccaaacacagccttgtacatgtaaatattgattaaaattgtgtgccttttctcctgttaatctatcttttgttagtttagtttgcaggcccccagggattgaacagaagaaggtagatgaaaagatttcctccccaatactcgttgcctaagaaatgtgagacattgttatttgcaggctcttcacctcactgttagtcatcccccatttccccctcccctacagcccacatcacatgacataactgcacgaaaggccactccattagacagagagaaagtctcttggaaacaggatgacttaagtcagatgacctcacaatagaaggattgtgggttattacaagaccctgtgccctttctggtaacaaatatccatgaaaggaccatcaaagatgcatatagagcaaaaattgcagaataatacctatgtgtatgctaaaagaaaatgctaagaaaaaaaatgataggcatgctgtgggcaggaagaacaggatggttgatatttatttctaaatatctgaaacccaaagttattccatggtattttaataaaagtcccatatgtaagaatcttttggtaataagaaagatatgaaaacacattttactggaaataagcatataagttgtaaagtttttaaaaagccccttctcctgaaccatgcctctagttaaatttaaatccaagtaatatcatccagttaactaatatggttttatctctgattctctggaaagatgtgtatccttcctggtaactattcccttaacaaagaggttgctatggatacatttttttttttttaaattgagtgctggcattttaaagcctgtgcaatttagtgcactatatctggccagagggttatactaatttaagtgcctgtatttaatgctagcaatttttatcttaatacacttgcttcatgcatttgacgtgccgtgttcaagagcgtaagagatggtgtgggtgttctttaaggaaaagcaagtaagacgaatatcgtacaacccacctaactgcaattgaatcagtggatgcttcactcgcctggaattcgtctgttcttggtgtgtttaataatgagtcatgcgatacatttgcaaggcaatggggccacctcccagggcctggggccacgttatgattttctgcgcctgagtcccccgtctttgttcagacaggttgctaatgcatcccgcgaagctgacctaatgctacttcagtgggtctatttttcttctgtggctcagctcgaatgtgatattcaggaagtcgactgtcaggcatgcaaattgagagaaaaatatgccacattaaatcatgatggtttaataaggtattactcatgggcaaatggcttctggtactctccttagtaggggcaagttgaaaagcataacctgccccagagaagagatctagcaatttcattgtcattccatctttgtcaaggcatttggtgaaatatgctccagttgacatactgtagctgccagtattctacctgaaaatataaacccacatgtatcctactttagtcaccaatattaagaatctttaccattatgattacacttgaggtgaaataccaaacatttcaaatgcttctaatgatagttccactctatgaatatgataccacttaggaatgtttcatggtatctcaagaattccttttcagagcaaaaggaaatctttacatttccatcttttactgcaaatagaaattaataaaataagtattcattttccttgcaactcaattgatttttctgtaatctgtagaaaatgagcatgttttctatatgccttctataagaatgcatacatttaaattataccttttccaatcagacatggaattttactaagaaaaaaaaagaataagtctagaatgaaagaattgtcatgctgaaattctccaggtcatttacacattgattactttgtctgctgcaaaactattaatttagtatttgccatggctttagaacttaagttctttacatagtaacttactttcataaatatggaagtataataattagggtggtgtatgtaacaataacataaaaacacttatttttgacaggctggtcattgtctgtcacagtcatgtcttcactcgtgaagattgaaagcaatgtcacatgaagaaactggtttcattcttcagttaacaatttaaatcagtgcttagttgtcccagactacaaaatatgttagaggcaacaaaaccatttttaatccttcttacctaactatagatattccatttaattttggatttgctttgttagatagagagaaaggagaaaggcaaagatttaaaaacataaaacagagggaacagcatgaaagcaactataaaatgctggcaaaatctggaagaatagaaaccatgtggaagtaagtattgtggaataaagatttaaaacccttcagaaatgttctttgaaaatccagcaacacagaggggaaaaatgaagaaaaattagccagtgccagtaagaaagcactttctctttccaccctgaccaattttcttttatttaaaagaaacagaacaagattaagagtttaaaaatagagaggagggcaaaacagtaatctgtagtttttttcttctttcagctgttcctctttaactataattaatcatcttctccaaacagcagacctccagggaactgcattgaggaaggaaaattcaaagcaatggaaacaaaatcagtccttacaggtttcaccgttgggatttggacccggagtgaaaagaggataatggtctcagagcagcctctggtggctgaatgtcaaaagctcaagaagtcagaggccaccttactagtgttctcttgacctccactctccacggtcttaagattttgtgcaaaggaagttactatttaaatgacttcaaggcactagttcagaattgattaggttggaattgaagtgaattcatcagtttcaagggcaatcacagatggactatggatttgatgctgacaaactgggccattccaacaatggggatatatatatatatatatatatatatatatatacaccactggtgactgacacctgaaattctaatttttaagcaatctgaatattttgattcttaaaacgctgtgtgtgtgtgtgtgtgtgtgtgtgcatgtgtgcacagagatctgtccatcagaagcatttggggtgcattttcttgtcacagctttcccagctgtacaacatctgtttaggacagaggcctatacattccatctggtatgttccccattgaaccatctcatctgggaagtttccaaggggcccttttcaaaatcttgagtcttataatctaacttgtatcaaatatcatgtccaaaagagtgctgcaatcttcagctccctttctatgagcatatcacatttacacatcaggttagaatgttttgttcaaaaacagatattctgtgttcaccaaaaaaaacttgaaggtttcaaacacagtgagggtaagtttgtgaatactcaaacacatattttaaattggtttcaataggagtctgctttatgtatttttttttttagtaattaaccagcagttctctgggcctgccagaggtgatggaattttgttaggaccacatggaccctacaaaagatctatggtatcaggagttcaagaccagcctgaccaacatggtgaaactccatctctactaaaaatacaaaaattagccaggcatggtggtgcacgcctgtaatcccagctactcaggaagctgaggcaggacaatcgcttgaacccaggaggcagaggttggagtgagccgagattgcaccactgtactccagcctgggtgacagagcaagactccatctaaaaaaaaaaaaaagaaagaaagaaagacctatgataacttgtgtgtacaatgttgaatttatagagcccacttcttattcacaaggaagtatcctggttcaatcaaatatcaacattagaattatctgggctcctaattaatgcctgaaaaagagacagcagctatttggaagtacaaggaattaatagtaatgtacagatgaacttcttagtctggacaaatgtgccaccattaggtaagatgttcataacaggggaggctgggggaaaggcatgcaggaactctctgtactacctttgcaactttctgtaaatcttaaaatgttccaaaatcaagagtttcttttttaaaaaaagtacagagagtaatgtcggcaaatacactcgggaagtgggaaaagatggacaaagttctctggcagaagaaaagtttaataacagtaggatattggccttgtcatccaagatggctgaataggaacagctccagtctgcagctcccagcatattccaactgaggtaccaggttcatctcattggggcttgtcagacagtgggtgcagcccacagagcagggcagggcgttgcctcacctgggaagcacaaggggttggggaattccctttcctagaaaagggaagccgtgacagacagcaactggaaaatcgggacactcccaccctaatactgtgcttttccaatggccttagcaaacggcacaccaggagattatatcctgcgcatggctcggagggtcccacacccacagagcctggctcactgctagcacagcaatctgagatcgaactgcaaggtggcagcgaggtggagggaggggcgtccgccattgctgaggcttgagaaggtgaacaaagctgccaggaagctcaaactgggtggagcccactgcagctcaaggaggcctgcctgcctctgtagactccacctctggggtcagggcatagctgaacaaaaggcagcagaaacttctgcagacttaaatgtccctgtctgacagctttgaagagagtagtgcttctcccagcatggagtttgagatctgagaacagacagactgcctcctcaagtgggtccctgacccccaagtagcctaactgggagacacatcccagtaagggccaactgacacctcatacagctgggtgcccctctgagatgaagcttccagaggaaggatcagatagcaaaatttgctgttctgcaacatttgctgttctgcagcctctgctggtgatacccaggcaaacagggcctggagtggacctccagcaaactccagcagacctgcagctgagagtcatgactgttagaaggaaaactaacaaagagaaaggacattcacaccaaaaccccatctgtacatcaccatcatcaaagaccaaaggtagataaaaccacaaagatggggagaaaccagagcagaaaagctgaaaattctaaaaaccagcacacgtcttctcctccaaaggaacgcaggtccttgccagcaatggaacaaagctggacagagaatgactttgacgagttgagagaagaaggcttcaggtgatcagtaataacaaacttctccgagctaaaggaggatgtttgaacccatcacaaagaagctaaaaaccttgcaaaaagatgagatgaatggctaactagaataaacagtgtagagaagtccttaaatgacctgactgagctgaaaaccatggcatgagaactacgtgatgcacgcacaagcttcagtagccaatttgatcaagtggaagaaagggtatcagtgattgaagatcaaatgagtgaaatgaagcgaaaagagaactttagagaaaaaagagtaaaaagaaatgaacaaagcctccaagaattatggcactatgtgaaaagaccaaatctacgtcggattggtgtgcctgaaagtgacggggagaatggaaccaagttggaaaacactcttcaggatattatccaggagaacctccccaacctagtgaggcaggccaacattcaaattcaggaaatacagagaatgccacaaagatactccttgagaagagcaattccaagacacataattgtcagattcaccatggtcgaaatgaaggaaaaaaatgttaagggcagccagagagaaaggtcgggttacccacaaagggaagcccatcagactaacagctgatctgtcggcagaaactctacaagccagaagggagtgagggccaatattcaacattcttgaagaaaagaattttcaacccagaatttcatatccagccaaactaagcttcataagtgaaggagaaataaaatcctttacagacaagcaaatgctgagagattttgtcaccaccaggcctgccttacaagagctcctgaaggaagcactaaacatggagaggaacaacaggtaccagccacagcaaaaacatgccaaattgtaaagaccatcagtgctaggaagaaactgcatcaactaacgagcaaaataaccagctaatatcattatgacaggatcaaattcacacataacaatattaactttaaatgtaaatgagctaaatgctccaattaaaagacacagactggcaaattggataaagagtcaagacccatcagtgtgctgtattcaggagacccatctcatgtgcagagacacacataggctcaaaataaagggatggaagaagacctaccaagcaaatggggggcaaaaaaagcaggggttgcaatcctagtctctgataaaacagactttaaaccaacaaacatcaaaagggacaaagaaggccattacataatggtaaagggatcaattcaacaagcagagctaactgtcctaaatatatatgcacccaatacaggagcacccagattcataaagcaagtccttagagacctacaaagagacttagactcccacacaataataatgggagacgttaacaccccactgtcaacattagacaaatcaacaagacagaaagttaacaaggatatccaggaattgaactcagctctgcaccaagcggacctaatagacatctacagaactctccaccccaaatcaacagaatatacattcttctcagcaccacaccacacttattccaaaattgaccacatagttggaagtaaagcactcctcagcaaatgtaaaagaacagaaattataacaaactgtctctcagaccacagtgcaatcaaactagaactcaggattaagaaactcactcaaaaccactcaactgcatggaaactgaacaacctgctcctgaatgactactgggtacataacgaaatgaaggcagaaataaagatgttctttgaaaccaatgagaacaaagacacaacataccagaatctctgggacacatttaagcagtgtgtagagggaaatttatagcactaaatgcccacaagagaaagcaggaaagatctaaaattgacaccccaacatcacaattaaaagaactagagaagcaagagcaaacacattcaaaagctagcagaaggcaagaaataactaagatcagagcagaactgaagaactaagatagagacacaaaaaaactcttcaaaaaatcaatgaatccaggagctggttttttgaaaagatcaacaaaattgatagactgctagcaagattaataaagaagaaaagagagaagaatcaaatagacacaataaaaaatgataaaggggatatcaccaccgatcccacagaaatacaaacaaccatcagagaatactataaacacctctacacaaataaactagaaaatctagaagaaatggacaaattcctggacacatacatcctcccaagactaaaccaggaagaagttgaatccctgaatagaccaatgacaggttctgaaattgaggcaataagtagcctaccaaccaaaaaagtcaaggaccagacagattcacagtcaaattctaccagaggtacaaagaggagctagtaccattccttctgaaactattccaatcaatagaaaaagaaggaatcctccctagttcattttataaggccaacatcatcctgataccaaagcctggcagagacacaacaaaaaaagagaattttagaccaatatccctgatgaacattgatgcaaaaatcctcaataaaatactggcaaaccaaatccagcagcacatcaaaacgtttatccaccgcgatcaagttggcttcatccctgggatgcaaggctggttcaacatacacaaatcagtaaacgtaatccatcatataaacagaaccaaagacaaaaaccacatgattatctcaatagatgcagaaaaggccttcgacaaaattcaacaacacttcatgctaaaaactctcaataaactaggtattgatggaatgtatctcaaaatagtaagagctatttatgacaaacttacagccaatatcatactgaatgggcaaaaactggacgcattccctttgaaaactggcacaagacagggatgccctctctcaccactcctattcaacacagtgttggaagttctggccagggcaatcaggcaggagaaagaaataaagggtattcaattaggaaaagaggaagtcaaattgtccctctttgcagatgacatgactgtatatttagaaaatcccatcgtctcagcccaaaatctccttaagctgataagcaacttcagcaaagtctcaggataaaaaatcaatgtgcaaaaatcacaagcattcctacacagcaataacagacagagagccaaatcatgagtgaactcccattcacaattgcttcaaagagaataaaatacctaggaatccaacttacaagggatgtgaaggacctcttcaaggagaactacaaaccactgctcaacgaaataaaagaggacacaaacaaatggaagaacattccatgctcatggataggaagaatcaatattgtgaaaatggccgtactacccaaggtaatttatagattcaatgccatccccatcaagctatcaatgactttcttcacagaattggaaaaaactactttaaagttcatatggaaccaaaaatgagcccacattgctaagacaatcctaagccaaaagaacaaagctggaggcatcacgctacctgacttcaaactatactacaagtttacagtaaccaaaacagcatgatactggtaccaaaacagagatatagaccaatggaacagaacagagccctcagaaataataccacacatctacaaccatctgatctttgacaaacctgacaaaaacaagaaatggggaaaagattccccatttaataaatggtgttgggaaaactggctagccatatgtagaaagctgaaactggataccttccttacatcttatacaaaaattaattcaagatggattaaagacttaaatgtaagacctaaaaccataaaaaccctagaagaaaacctaggcaataccattcagaacgtaggcatgggcagggacttcatgtctaaaacaccaaaagcaatggcaacaaaagccaaaaatgacaaatgggatctaattaaactaaagagcttctgcacagcaaaagaaactaccatcagagtgaacaggcaacctacagaatgggagaaaatttttacaatctacccatctgacaaagggctaatatccagaatctacaaagaacttaaacaaatttacaagaaaaaatcaaacagccccatcaaaaagtgggcaaaggatatgaacagacacttctcaaaagaagacatttatgcagccaacagacacgtgaaaaaatgctcatcatcactggccatcagagaaatgcaaatcaaaaccacaatgagataccatctcacaccagttacaatggcgatcattaaaaagtcaggaaacaacaggtgctggagagcatgtggagaaataggaacggttggtgggactgtcaactagttcaaccattgtggaagtcagtgtagcgattcctcagggatctagaactagaaataccatttgacccagccatcccattactgggtatatacccaaaggactataaatcatgctgctataaagacacatgcacatgtatgtttattgtggcactattcacaatagcaaagacttggaaccaacccaaatgtccaacaatgatagactggattaagaaaatgtggcacatatacaccatggaatactatgcagccataaaaaatgatgagttcatgtcctttgtagggacaaggatgaagctggaaaccatcattctgagcaaactatcacaaggacagaaaaccaaacaccatatgttctcactcataggtgggaattgaacaatgagaacacttggacacagggtggggaacatcacacaccggggcctgttgtggggttgggggagggaggagggatagcattaggagatataccttatgtaaataatgagttaatgggtgcagcacaccaacctggcacgtgtatacatatgtaacaaacctgcacgttgtgcacatgtaccctagaacttaaagtataataaaaataataaaaaaacagtaggttattaatcactgttgtttgttatgtaccaggcacttaactacacaccttaactacagaaactaaattaaattgtgccctttaaatgcattgataaaggaatattattacctgctctcattaaaaaaaagaaccaattcataagaaaacaagtccagaagtgtggtgcttaaatttcagtaggagaccttcattcctccttcctctcagccatctccctattttatccgtccctaggatcttcggcccctccaaaccctgtctttattggttcccaccacgacatttctttttcattattcatatgtttgagtatcagaataaatattctgatactcaaatatttgaattttgagatcattacaggtattagtttttcatatgaaaaagcaaggggcagttgatgtgctgatggcaacacaagaatcctagttagaacagacctcggtctggccatgaagttccattgtgaattctctggacttgatcagttctttagcacttttcaagcaacctaattagtatctcagctattcttagctccagaacagggtccaaagttcccatgatgacagtcatgtggcaaaatttccaagtgtgacacaaaaacattactccttttcaaactcagaaagtgtaagaagcacagattacaagcagaaagagtatgtatccaaagcccagtttccttttaaacctctcttgtcttctttttaattccactgggacttttattgatcctgttctttcttgcatttgctgctttgtcattgccgtgattgaagtcagacatcttttgaacttcttcctaaatgttgtaggtgcgacagcatggcactttgttctcaagcttttctaccatagtggtaagtacagttagttgagccggggcagtgcaacatggctgaaagtccaagtgaacagggggtcaggagggctctcttcaattttctctgtcaccagcatgctttgtgtcctggggcaacctatgtaacttctcagggtctccaagtcctgaggtgggtagtgttaaaagaaaaactttagctgaattaaatttaagagtttaatggagcaaaggatgattctcaaatcaggtagcctcctgaagctcagagactccagtgcagccacatggtaagatttatggacagaaaaaggaaagtgacatacagaaaacggaaatgacttacagaaacagctgaattggtcacagctcagttttgtcttatttgaacatggtttgaacagttggtcacctttgattggccaaaacttagtggttggtgcaagagtagactacagtctctttacaactccatttaggtgatagttcatgatatacagagaaacctttaggtcgagcttaaaatatgtaaggaggcagctttaggctaaacttgatttaacagtagtgaggggctgggctttgtgcagataaaccactagggtttactaagcaccctattggacacctcttaagtaccacatcaaggcttctagttgccaactcttcctccagccactgctgtggtgacagtttctatgttggctttaaccagtttcccttgggtgcagtctgacagtgtcttgcccctggttgtaccaaggacctcttgattcctaccttgaggcttttctgacagggcaaaggaaacccatccctcaactctcctggattggcaacccagatgtacagggagttgactttcatggggccacccaagatggatgggccacaggagcctcttttccctcagaacaggggagttctgagacagatttgataagctcctcagaacactccctgggatgaacctcagttgtccataggagaagccaagttggtaatgcccttgtctgggctttacagctgtgttttactctcctcgccaccactccccgaaccacactgccactccctgagaccacctcccatacaaacttcctctaaggaagccttgcttcaagatctgctgtgggcagacacaggctaagacaagcacctactccatatcagacatcttcatcctttcccgctttaaatgttgatgggtgtgcaattgcttgctggcagagttcaattctgcccagtggtccttgtaataagaacagactgggaagaagctgagtggccaggataactgaaaattacttccagctttttgcctgacttcaagaggccaccgggtataagactctggtatagtcccagggtatatttggctatatcacacagcaacctaatataagtggaaaggaggtataacagagagtaatttaaacagaaataggctaatgagaaagaccccaaaactgttcttctctctttccaccccctgatgttaaggaaaaccataggggaaggaaattttcgcctccatttctgctcaatacagaagttttaaagttcaggagaaaaatgtctgagaagcacatttttgcatgttgcccaaaatgagggaagtgtgccatttctccctttagaacacagccaagggacattaataatggttagggggaaaaagagtattctttgtcaattaggtttggaaaataagttaagtaatcttttataaaataaatggcaaattttctctgagccttgaaaatagtaacatatattgtgattctttgagagggaggctgagaaaacagcatttacctaatttattttttgacctaaccatttttccacaggccattttgcagaaaaagaaggtgtgaaacaggaatttttctaattatatcagagaaacgaaaagaaggctgtcttttttgcttgattttaacaatatcttaattggaggatgtaataggtaaacactcaaggctgcttctctcactatgatcctgatacagtacttgtggcataagatatacaaatgaccaaatctttttatggtgaattagggtatatatggcattgctccatctcacccacacctctcaagctacacaaccatccaggaggtaggtgtaacaggaacctttactctttgatagagaaaacagttcagtgttcacctatatttaagtgatgggggaggcagagccaggaaatcagatctatgtcttccagctcccgatccagcattgttaccaccaccacatctatattttgacatttttattagtttatttatttagcatcccattctatagaaggggaattgctttttatttctagttgtgatttgatctttccccaatactactcccacaaaatgaaacatatgaggttgagaagggtcaacatcactgctggaaaactattaagagtattgtgtgcctttcaactctaacttcaaatggagaattagactctagaagggttaatattaaagagtgctaaaaattaaaaataaaaaaccctgaaaaaataacatgatattttgaaaatggaagaataaagggcatattctgctcacagtgccacaaataagtaagttatctatttgggggttagtagtgggttgagatgtacctgattccacgtgtccctagcatgtagtgagccaactcagaacaataccagccctttgtgtgggaaagcatggaaaatgcagtcatcgccattcaagtgtggtttagggtgaaatctctgagcgtcagaatcatcatatacgtaggtaaaagaagagcagaactaccacaaattacccagaataagaatttttcatttctcattttaggcatttcctccaggtatcaaaattaaattttgctttcatcttatacacatcactgtatgactaccatctttatgaaaaaggaatacacaaaattcctcaataatctccagccacaggctccaactgttccagttctgactttttaaaaccatcacctctggcagaaaaatatgagattccactgccataaatccagttttcacagatttcatatatgtacacatgaacaccaacagtaagaaagatttccacgaagctttcctctatctgtatattttagtatgtattttcgtagctatggtgttgttacaatgccccagtgactgtgaacttggataagtcttgctgaggatggcagagtggaaaacagagacacaccaggattcttgatgacatcattatgccaaagaagtagtcaactgtggaactgtgtttgaatttgtgtgtctctctctgtgtgcgtgtgtgtgtgttttaaggaaatctgtgtttttaaagccactataatcaactaactaaaacatgcaatccaaaactctgcattatgatactttgaaatattttttaacgcattcacaggccaaacaatattgtgagaaagcaaatttatttcagaccaataaaagaagaagatgagtgatgccaggagagaaaaactccttaacatatgtgatcttccttttcttcatttgctaaatagaatctaagatatatctacctcattgagatcgtaagtccatagtaaggattcattatttgactattttattttgcattagaaagtgtggcagagacaatgttatatgtccagtaactcctgttacattttgtttttcttcctgggcacacgggaagaccattatttcccagcttcccgtgttgttaggctgtgatcatgtgactgagatctgagctgtgggaaaaagtgatgaaagccacatgtggcctggtttttattactgttgcacatgatcctctgccttctttcctggtgtcatgttactattacgtttgaatatgaaggtctaaccactacaagcaggagatcaagccttcatattggccactatatagacattgagtagttttattttattaaaatattgaagatttccttaagttcacaactttgttcatgctttttcacacatgcttcttgctttccctttaaaaaggaaatataaattaataattaggaaagctagctcaaaacctatattaaaataagtatggggaaatggctttaaaatatcagataaagtttacaaaaatctataggcaaattttctccatagaagcaaagcagctactcctagcagtacaaatgaggcccctctaagtaggtgcatgtaagtgggtattatacatgcctaaacatctactaaagagaaagcccattaagaaaatgatgtctggaggcacctacatctttttcccctttttcaagtacagcctagacatcttatcttctgcagcttttaacacaatctctgcatttccattccatctggcggggctggttgaagggaagatgtgagaatatgctgaaggagaaatctacctctccttctagttggatcacattacaacatgtgagcaagcaaaatgtgtgtgcccactaacgtcagcatggttttcgttttgtgaatcatatcatgtttatagcaacctcttctttttgtaagcaggcacaataacagaattgcaatttgtatccatctaagtaagaaaataagcaatgaaaatcatttctataaaagaaacctagaagataaagaagtctctagcgtttttcaaaggaccctagctaccattataatttttaatatgaaccgtgcaatgtggaatactgttgatttggcatggggaatgatcttcaaactttagtttgttgaaaaataatgtatgtgttcatttgaattctgatcttatatttcacttaaaacagtgctcacatatgaatttattgattttggcatagcttaactttgaaaatattaatttttgaacacttaacgtgtcaatctgactgtaatatttaaaagaaaaagtcttgttcagtaatagtatgtactttataactttaaaaagtatatgaaaataaactgataggttgtagataagaacacagaaactgcattcatatttaagataagattatgaaaacaaaagagttcaaagaaaattcacaggagacatataactcctgtcacttggggataaaaagccacatctctctgttgataagggaacctcagtggaaagttttgaaaagtactgttcgaattatttggtcaggtcacttatctctagcttgattttaaccttggagcacaaggaacttccccaaaatatggctccctggtataatgagtatttcgaattaaaggcctttagaaatcaacagataaaagaagagagctccccgccatctacataaggattggacagacccaccaagaagaacaattacttctccctccccgcaacttgcccctcccatctctgaatcctctatctctcccaaagcacaggctgaagttgttctctaaagtttcagcctaaagtccggacctaacaaagaagaaaacaattacctctggtccctcccctgagttttcattattgcaggaaggaaggctgaagtctattaacaaacctggacagattttgtcacaaaccattgtctgctctgcaggcccaacaaactttgttccagaccattgtatgttcttcaagcccattgaatctccctaaaaataatttactaatccctaaaatcatccacacttccccatctcccgctctcctaagaagcagggtgtataagcatctgtaccctgttgggatattgggcattcagtctgtgattgtccccctgcccacggtagtaatacctttatatggcttttctcttaatctccctttttgtgagttgatttttcaacaaaccttccaagggcgaagggaaagctttccctttgcccctacaaccttgagagtttcatgtctaagtgggggttcttgaacacatccagggacagaaaactcattctctcccttgcaatccccttatagctggacagctctaaaagttagtagatgtgttagtcagggtaagtgaatctagctgcacaagaaaagatcccccacatctacatggcttgacacaataaaggtttatttaatgttcatatcacaatgcaccaggcagttctgctcagctggctcttttcgcagatcttggcttctttcacctaccatcttacaggacctcagagtcctccccaggaccctctgcatctgactagcagcaggggaacagagaatatgtggaagagctcagagggggctttagaggtcaggactggaagtagcatatactaagctcacccatactttattggcttgactgacataggcacatggccccacttagatagcaaggggttaaaatatatagactatcagggtaaccaagatggagatgagttcacagatgttggagagtactagcagtgtctgttatggaaaactgtccttccattgagctaaggtgtttcttgcagtagtttctacctatagaacccagcttaactttgggtcacattgaccaagtttaattctgctttcatatgacagccccacagatatttgaagacagtcattatgcctctacgtctacttgcttctgggctattcatccaattagtcaacttgttctcatatcatcagttttcacatcccctcatgatttgtttgtttgttttttgagacagggtctcgctctgttgtccaggctggagtgcattggcacgataatggctcactgcagcctccaccttctgggttcaagtgatcctcccatctcagcctcctgagtagctggggctataggcacatgccaccacatccagctaattaaaattttttttcagtaaaggcggggtcccaccatgttgcccaggttagtcttgctctcctgggctcaagtcatcctcccacttctgcctcccaatgtgctcggattacaggtgtgagccactgtgccaggtcattttttgttttcctaagctccaattgctttacagtttgaatgaaaactgaatgagatactccaatagtgaccccagcttgagatattgtaaatttattactacaaattaccatattaggttctgttaattcatattgaacttactccttctaaatgatttagctaatttggctgctaagctacattttcttcctttttgcacttagtttattactggaagtcttgatattttcttcatttcattttgttgaatttgaataccatcactagctgaattataatacttcagctcgtgtctgtcccatctctggccctgtaaacagatgtgcccatacctaaaagagagggcatttaagagccaaccataaggaccaccagatgctcagatcagaatctttgtagttatccatggttttttgttgttgttgttttttctgtctctcaaatccagcatccaatcttataagaaaatcctgttgacttcaccttgaaaacacacccagaatctgatggcctctcttcctgtccttctgcttcatcttttgattgcattactgctggagcctcttctgggtgcttgctcctaccttgcattcccctgcactccttcccagcctatttcaaagctgtcattcttttgaactcttctgctcaagactcttcgttggctcccatttcacaagagtaaaagacaaagtccacgcaatgctcccaaagctctaagaggctgtccttgctgtgacctagtcctctcccagttgcccctgactcccgctgccctcaccactctgaggccccgtcagttcttcacagacgccacaggctcccatctcaggcctttgcacttgctgttctttctgcccatagttcttgcctccaggatatcagcatgatttgcactcttagtttcttcaggtgtctgctcaattcttaacctctcccaaaaggccttcctagacaccttacacgaaagggtaacctccttgctcctctcctttgtggagggccttggttcctgtatatcctgctttatttgtatttgcagcacccctcactagctgacagtgattggtttattgtccatctccctccattagaatataaactgaacaagggcagggactcatttaattgacttttgtggcctcagcatccagaatagcactagatgtgctgctggtgctcaataaagattggctgaagaaggcacagatgctttactgtccccagcttcctgcttcccccagcttcatacacttccccgtagcttcctatgctctttgcagagacagatcatcccctggttcctaaatttgtatttcaaagtattagctgctttcctagctttatgtgttacccttcaaatgtgtagattaatgagtaaaatgtagcttcattaaggcatgaactagttgagactctaagttaacttgggcaaaaccagttcagcaattcccatgtcttgtcttgtatttctgcctctcgacttagaaataaactctggtgcggtaaccaaagttctctccaagacaatattgtccacactgggtgttgttaatgctaaaatcatccacagcacatttctcagaaaacatctgctcttaataattggggatgaggtctgtgcctccttaaactttcctatacatcattggtcaaaaaggtagaaataaaaacctgtatttcttaaaacaaggaaaacattgcttttctaatgaaaactcaaagagttgaaatatgaaaaataaaaatcccctcaaatttgaaaacataacaaaatttaattattttgttgatggaggttaaaaaacattgataagttttatggccttttgccgaaatctatcatcacttttggaaaacaaaactcttcccagcaatacctttaaaggctgtgcttcacaggaatgcaaaagaaaattgccaaaagattacattgtataatttgtccctgccaagcattctacttgaataacagaaaattctaccaagattttaatagaactgttctttagcttcagttaactaaacccctctgtgaaacattagaaagatgtatgcatcatttctatgtttattcagacaacaaatatttataggcagcttgctttatacacaggatttgaaaagagaagatttttcacagcagagatagtcctggcaaagacggaattccagctgggtcaactgaatctttaactagggcatctagatatagagatactaatatagttatagttatatataaatatagcagcaagcaaaataaatttggtcttattctataagtttattcatgtacttcctctacctcgagaatataatttaaatattacagaaaacacttctgtcctgagaagaactttccctccaaatagcattagctagttttgctttccctggtaattcagttattcattcaagaacaatttatggcagtgatgccccaacccttttggcgccagggaccggtttcatggaagacaatttttccatgaatccgggatgggtgggaggaaggtggtctcaggatgaaactgttccacttcagatcatcaagcgttagattaccataaggagtgggcaacctagatccctcgcatgcacggttcacaataaggtttgcgctcctatgagagtctaatgccgccgctgatctgacaagagagagagctcaggcgataatgctcactcactggccactcatctcctactgtgtagcctggttcctaacaagccacagactgggaccggtactagtccatggcctggggacttgggggcccctgatttatgggactcccacacatgccagagtgggcaaggcactggagatgtgaaaatgcacaaaaccctcaaaaacccacagtgcagtggggactggagggacaaagggtgacattaggagcatgtgctacagaaaactcagcctgattcattcagtaattccacaaatattgattgagtgcctgctgtatacactggtctagatgcttgagacacaccagtgaaataaactgacaaaaaactctgcctttgatgtgcttgcatagcaggatataaaaacgatagacaagaaacacaacgaacaaggaaattacataatatcttagaggataagccctatggggaaataaatcaaattttccttcaagttggacagcggaagaatggatatgcaagacctcaaaaaagttgccttccatgtaacattttccagtatgtgttccagaaaaaaatgaaagagaaaaccaagaaagagaaaaaatggaatctaggaaacacaagaattaagccagagaaaggcaaagaaaacatgggaggaacagttcttcccccttcctctcccatcatctgggttgaatatgagccaccagtatcatcccccagtatgcaagccaggccaataagctttagttgcaggattttctaaattgggcctgacagaagagagtactttcctctcaggttatgatgcagtgaggatgtgatcccaagagctaaaagtgacccggacctcctgccttatgaagacagctcacccatgagactgaagttggtagagagaaagaatagaaacaggaagaagcagacaggtcattctaccattgtattcctgtttctgtgcagcttcaaatgccctctgatagtagatcacatgaattggtcacaaattatgtcaacaagtgaaatctacccactctttgaatctgggtgtggccacatgactcttattggtcaatgggacattagcaaacacgaagcaagcagaggctaaaaagtgtttgtggtttggggcttgtgctcgctggccgctgggaacctttcattaatatataaagtgggccagactggccacctggaggatgagagatgaggtggagcagcgattgatcatgtagatcatgtagaagcatctcagctggtgttttctagatccaccagccctctcatcacctgccagctgactgcagacacatgagtgaccccaagtgagccaagcagaagaattgcccagctgaatccagctaattgctgacccacagaatcatagctaaagattattgttttaagccactaaattttatgatggtttgttatgcagcgctggataactgatacactctacacacacacatgcacacactacacacactttatattttttcttaaagtaaaacaattttttgccatttgcaatcaaaagaagttctaactaaaatcatagagcttcttgtgcttgtgtcattgacttggtgccctgttcattaatttagttattctgtgacttgaactatgcccctgaattccaagcttctccttccaatctcaatgttgacattatccacctgtgctttgtccaggataaagacactaccgtttgtggataaacaaactacaaaagaaccttctcctccctcctcttcaatgcccacacctgtcaggttggcccccttcctatggccttttgccaagggtctgtactgccacttcctgttggctcttttcaatgccaacagcttgacaatgtgactctccatctgtcactaattgctggacctactgtcatccctcttcacttgtctgtgcagacttcactccctcctgcaaataggagagctatccacctgccaaatgccaacagtcagtttccagcctagatctgaaccctttctggcctattctgtttcgttagattgagattcccatacgattactcttccagtttatcctctgtctgggttagagctgggtctgggaaggtaagtgaatctctttaagctctcatattcagatgacaaatcacatacagtagaagtagatggtgattttttttaaaaaaaaaaacaagccatgggaaaactattctcttcctcgtggaagaatattgacaaggctcttgcaggcacccgtggagtctgtttattgcctttggggttgtagacaatgaaattgattctcaatatcaaccagataggtcaattctctgctcatattcccttaggcctttccatttctatgcccagtagcctgacatccaactgccagtctctacaatttttttaccagagagttttctctggtgctggagccagctttgcttgcatatggcagcccagaagtgctggagaattaatgtctcccacttctaccactgtgcagtcctcatgcagtgactggccagaattggtgtattaatacccccgctcccttgtccctcagataggatatctctgaggagtatgttttccactggatctcagagttccccaataagattaagcttcagtgcccacagtggtaacttacctgataacctattctttattggttttcctctcttccttgtctctctcccccaaataaattacatgcccttgaaattttgtctcaaggtctgcatccaagagaacccaaaccaagataataatccacccagtaactgaatactctataggacaggagctggatctatggagatggtaacaatttaaaaggaaaaacagcacaataatatgatgatgatcagaaccagccacttagatggtgagcaaaatcagtgttgctaccaggccccatttgccctctatcttagtcttgggtgaccttcctgatagtagagtatgtgaaccaaggatgaatataagggaaatttttggttataacctgattaatccatgggtgtgggcatcagtcactttgcccaatatccacagggcaataaacttgtggaatttaatttttttgtaatgtgtgactatttaaacattattttacagatttttatgggagaatgatactctgatatggttcttcgtccaaaagcaaagtacaacttaaaagataaccagcgggacttccaatagctatgttcaaatatttatgaaacattgacttttgggttgtaggctaaagcacagagtttaaattggttagttctattgccaaatgccttcagacttcattgacttttttggaattagtacagaagcagagattagatccaaaacttttacagagattctgtgtggtccagaaaattatgagtctttgcttgtacatagaaattaaatattacacatgtttacactccatcttttgagacagtgagcaattgaggcgtctgaactgattgaagaaagacctctctataaatctatgacctattattcttctaccaaagagtggaaaaattcttaatagttctgaatgatgaactttcttaaaaaattgggaattttggcatctgggaggcaatgctaaccatttgaatagggcttcctttactttcagtcagtattgcagtcattgctttgtcaagggttctgagatccctcaagcatgaaaggaaggataaggaatcaaatcctttctctacttaatagggaatgtctcagaactgcttcaaaattagctttggctcagcttaatgaaatttccccattgttgagcagcggcccacaaaatccacagcattaaaatggcagtccttcaactgtaaaaaaaaaaaaaaaaaaaaaaaaaaaaaaaaaaaagccttgaaaattacagaacatacaaaaataaagatttttatttctcttccccaggttcacagaaagaactgaacctgctcagccttttgagtaggctaaatattagaggcactccaactcaggaggacgtgttttactcgcacaatttaacccataaaatgcctatgatagaggactcgaagtttctgcaatgaaactcaccagccctgctgccctcaggaaatcattttagaggacagcagagcaaccaagagacatgagagggagctactcctcactggtgttgcttaagtttctccagtggggtcttattcagaaggtgtttctcttgagacttctccccagctctggttaaattaatttggctttactggactgagataagataattataattgcttctctatcccctttccttttcactttgcacccacacacaatctttgtgttttcaaaactccttaaaatatcactataatatatgacatcaatttctttatattaacatgtgcataaaatttgacactcagtgctcacctttcatcactcagtatctactcatctccctttgcctgaacaagggtgcatccaaacttacagtctttggagcacaaatcaatgtagcaatgtagccaacaaaggatctcttgattcaaatgataccaatgtcaaatgctgatgtgtgtaaataattaattgtgttttcactggtgagtccagtttgatctttcattgcttggcgacccctggggtctgtggctccctgagaagcaggaacatttaggattttttattaccagctcatcaataatttatagattactatggagtcaggtgcacagattcagagtatcatctatcactataggcagctccagtgttaagggatggctacttcccagaaatcaacgaaggggaacagatgaggaaagggggcaacatggcacatatgccacagaaggcacatctttcagaaacacaaacatatcaaggtaaacaatttccttctcactgagccagacaaactataaagtgctctaactatcccctaaaggtaaaacaccactgtatgttacatagccaaatataattcaactgttatcacttatcattaaaattatttatgtttttcttctcttctatgctgtcttaggtgaaagtttcactagaacaactcttagattcaaacttgtagaaagcgctattgcttaaaaaaggggggtgggggaggatgggtactttcttaacgggaaaattgtgtcttgccagaaaatgaccttgaaattagagggaggtattggagtttaatcacagctttgataacgtatgtgctgtgtcttttggacaatgccattgagtgtggggttcatgtccttatgattgtctaaagtgtgtcacagtacatgcacatgttgtgatggaaagaagcaaaatgtacaaacaataaaagggccatttattacagaccttcaaggaaaccaacaatgactttgggatgtatgttgcattcctgaattttacatgattttctggatagcattaacagttttctgagaatgttcttaagaattccatttctatcacagccatgtatgtattcccaccctctgaccccacagtcgtgtctctcccaacttctccccaaagctggttctcacagagcaaaggaaagatgggctgtgcaaataaaacctaaacccaatggaatttgaaacaagtcctagtaggataaagaaatctctgaacatattcataaggagtgtttctttagggaacttttctgtttcagggacaccactgaggctgtgccacattctgaaactgttgctatggcaaagcgtcttgtgttattgacgatggagcacattgttgtgtttaagtcatgtaaatgatcaggacacaaaggaagctgcccacagcagcccctgctcaatcaccacagcgctggggcctttcccccttgacacatgccatttacacggcatgggaaggcatttctttcagaaagcctcactccctgggtgctgtgaactgttctttggagacgtttatgagatctccacatctttcagaatcgattctgcaggggaaaaagaatacacaatgacaaagccctttcttttgttttaaggtcaggatatttctatagacattttgcattttctacctattaacacatttttttttccgggctgctggtcttgtctaatatttcaactttctatcagttcttgtcatttagagtccaactatgagagtttctcctttgtttcccacttatagctcaaatatgtgtttttaattattttccacagcatcaattcacactgattagacataattacagaaacaaaatatgcagaatacattttaataatgcctgtcacctctgagggaacaatgaggatctaatttaatgatctaagtgttgtttgaaagcgacacagagtttttaaaaatagtactatatattttgaagtggagcttattagtatttttagatacaaatgtaagctgaaatgaactattattcaggtttcaatgcatgtaattaaaaaaacacttagggcaatgcttgtttacacaaagaatcaaattataccctttaataataaaagcttgatccaactgtgacacttgagacttgaaatgatgtgataatttgtagtccaatttctaagggaaattttgccatatgaaaatctatttttgacaatactgtgtcaaagtcaatgtcctggttttgacattactgtggttatgaaagatgttttcattgggggaagccgcatgaatggtacgggggaactctctgcattagttttgcaaactcttgtgtgtctccaactatttcttttttttttttgagatggagtctcgctctgctgcccaggctggagtgcagtggtgcgatctcggctcactgcaaactctaccttctgggttcacaccattctcctgcctcagcctcccgagtagctgggactacaggcacccaccaccacacccagctgattttttgtatatttagcagagacggggtttccaccgtgttagccaggatggtctcaatctcctgacctcgtgatccacccacttcggcctcccaaagtgctgggattacaggcatgagccaccgcacccggcattgtgtctccaactatttcataataaaaaaagttatatcaaaaatctatttttcatacctaataaaaatatattttttctacttgtagaagaatatgctgtctcagtagagcttagaatattactattacagaaccatatgacattactctcaatatttgtcttggcatctggagtcaaaggaattttagacaatgagttaactttctcaaagaaaatctctttaccccgaattttcaacttgttcagaaaagaatttgtaaacagttatgaatgagaaatctacttacttttactgtttcagacgctcttctagaagttattaaaacagtatttacaattctcataaatctggaggcataattggatctcatttcctttgcctttttcgctctttttaaaaactcttttggctcggtgtggtggctcacgcctgtaatcccagcactttgggaggccgaggtgggcagatcacctgaggtcaggagtttgagaccagcctgaccaacagggagaaactccatctctactaaaaatacaaaattagctgggcatggtggcgcatgcctgtaatcctagcttctcaggaggctgaggcaggagaatctcttgaaccggggaggcggaggttgtggtgagccgagatcacaccattgcactccagcctgggcaacaagagccaaacactgtctcaaaacaaacaaacaaagaaacaaacagatacacacacaaaacaagcaaacaaacaaaaaccctcttttaactccatagttaaaaccatagttttgcattcctagctgtcatgagtgaagctgagatttaaaaaagtaatataggactatcacaaaccaaagttacatctaacataaatgtccattcatatttcatttggctgtgattgtgtatttgtggcatgtatatcggtgtgtagggaggatgcgtgtgtactcatacaatgttaggatcggcaggaccataggaatctcctaattcaagctcaatattaacatattcaatatacataggttcgatatttataatatatactgctgattgtgcaataattcttcacattcccatggccttctttaagaggtcatcatagcacacatctaattttatcctaacataattctacgagcttgctagagggcattattattattctactgagaaaatgggcagctaattccaaagaggtccagctttggctcagtcttacacggcatgtgaatggtgaggttgaggattaaaacccagattccacatccttgctcagagtacttcattctggcccacaatctctaaagctacaactgtctaaatacactgtctacactgtcttgtataatatctgaaacagtgcatgttggagggagagttctattaaaatgataataggagttagttaattctttttaaactgtaacaattaaaagcattttgtgagtgacctaggaacacggctctgtatcataacccctttctcttttctttttttttaaagtttagttgagatacaattcacataccacacaatgtacccatctaatgtggacaatttaatgttttaaagtatattcccagtgtcctacaaccatcatcaacatctaattttagaacagctttatccccccaataaaagaaatgctgtgcccattagcagtcactccctttccccctacccttcacccctagccccttgcaaccactaattgactttctatctctatgaatttgcctattctggacatttcacataaatggaatcctacaatatgtgatcctctgtgactgccttctttctctgagcatgatgtagcatgtatcagcagctgaataatactttttagagctgaatactatccggttgtacggaaatgcatggatatcctgcatttgtttttttgtttgttttttgtttgtttgtttgtatttagacagttgtagctttagagattgtgggccagaatgaagtactctgagcaaggatgtggaatctgggttttaatcctcaacctcaccattcacatgccgtgtaagactgagccaaagctggacctctttggaattagctgcccattttctcagtagaataataataatgccctctagcaagctcgtagaattatgttaggataaaattagatgtgtgctatgatggcctcttaaagaaggccatgggaatgtgaagaattattgcacaatcagcagtatatattataaatatcaaacctatgtatattgaatgtgttaatattgagcttgaattaggagattcctatggtcctgttgatgctaacattgtatgagtatacacgcatcctccctacacacccatatacatgccacaaatacacaatcacagccaaatgaaatatgaatggacatttatgttagatgtaactttggtttgtgatagtcctatattacttttttaaatctcagcttcactcatgacagctaggaatgcaaaactatggttttaactatggagttaaaagagggtttttgtttgtttgcttgttttgtgtgtgtatctgtttgtttctttgtttgtttgttttgagacagtgtttggctcttgttgcccaggctggagtgcaatggtgtgatctcggctcaccacaacctccacctcccgggttcaagcgattctcctgcctcagcctcctgagaagctaggattacagtcatgtaccaccatgtccagctatttttatttttttgtatttttagtagagatggtggtttcaccatgttggccagggtggactcaaactcctgacctcaaatgatccacctgcctcggcctcccaaagtgctaggattataggcatgagccaccacgcccagcaatatgctacgttttatttatccattcatccactgataaacatttgcgctgtttccactttttggctattgtaaataatgctgctatgaacattcatatacatgttgttgtgtgaacatatgttttcatttctcttggatatatacctaaaagtacactcgttggatcatatggtaaccttatgtttaactttttgaggaactgccaaaccatttccaaagtgactgcaccatatttcatttccactaataatccttttcttaacttgagctggtaaagcctccgtgatggctcctggtagttactaaactaaccatcaaagtcctttcttgcacacacttctgggtctggtcaggtgaaaagtgggagagtgtatttgcctcacatgatttcagaaaagccatcagaaattagaatgggaaacaaggagattaaggatatgcatattaattaaacatctagaatgtaagttatttattggtgaggaaatttaaaactttaagttgcatcaaatacacacacacaattcaagcggccatacaaaaataaaaaacaaaccaaatcaaccaaccagtcaaacagagattcacaacatcatccttggcatttgatcttccatctgtagcccctgaagtagtgcaacaatatgagatatttgaaccgtttttgtagctcttaatagcaagagatatttttggctatgaagacatctaggtcaaagccctcacacttgcttcttgctcacagatgtacaactatttcaaaaaaatctccaaaaccatatgaataaaccttttataatcttaaggattcttaagcctctagacagagattgatacagaccctgacttttaaagcaagctgggacaccttctggaattcaaaacacatgcttggcccctgacaagtcaagctagagtctggaggtgaattcggctggttcttttacacacgaacctcgcaacactctgactagctctttttgtgtggccagaaaggtcttgaggcttcgaggctgcaaacagttcctgacctgtcactgctagactcaaatagccactttttttttttttttttgagacagattcttgctttgtcgcccaggctggagtgtagtggtgcaatcctagctcactgcagccttgatctcctgggctcaagcaatcctcccacctcagtctccggagtagatgggactgcaggcacacgccaccacacccagctaattttcttattttctgtagagacgaggtcttgccatattgcttgggctggtctcaaactcctgggctcaagtgatccacccacctcggcctcccaaagtgccaggattataggcgtgagccaccccgcctggccaagtagccatcttcacttctttgccctgatgtttattatatccatcagtcagcacttttgacttgcttttttctgtgacacacgtgacctgatttcagctaggtcagtacaaagccaaaaaggaaaattgtttgggatgtttctcttattccattgtctcttccctatgaccagacacattttctggatggggaacaatctcaagcaggggatggctggaaagtgttgagtgaaaacgcaagacacgatgagagagaaagaataagtaaaaataaaaaaagagagagaaaaaagagtgaaatagggaaaggctatgtcataagacaaaggtcaaagtgggaaagagtggcagagaacagggaaagcagagagaagaatcttgagatgaaggtcttagcaagtgataatctcctgggatcttctcagtcgctattgatgtctttcccctaggattgtgcaataatttattggtaatgctcaaattgaatttgcaaatgacttcaaaccttagcaggagatactggtagtttatagctttgcaaattgaaattgaaactcaaagtgcccttgataaactgcaaaaaaaaaaaaaaaaagcaaatagaagaaatcccctctagattatgcaatagcacaccaaatgagttttttgaaaaatggaagaggaataagtgaaactagccagctaactaacagcaggcactgattctagaagtaaattggatatggaggtatactcaagtgttggtatttatcctgaggaaatctggccattcaaatgatttcaaagatactcggcctagttctgagcacaattaaagggggtgtggggaacttggaaagagttcagaggaaaaccacaaagatcaaagaggtgaagaaaagggagctcagaggaaagtcgaggagctggaaaaatccaacctgaagaagagaaggtaaaggagataatttaattacggtcctcagctataagacgagcttttcataggtggccacctgttctctgtttccactatggatggatagaaaggcaggggcttaaatatgcaatatgggggatttcatttaggtataaggaatttcctgacatgaaagctggtaaatgatgaaatgggctcctgatcatggacaggaataaggaatattcttcttacaaaataggtaaaattctcacaggtttggaatggtttacagatcttgctacctagagttgggggtgggacagggaagtgggtatactctaacattctagaagaacagattctggtaccttgattttgcttcagacttgtgtatgcacccctcgcctggcccaatgcctcacatttccctggctttacacaaaatgtcctccctggcacaccactttgagatgtaatcatctcctctgtgaaaaagagcactggaaaatatgtttggaagagctggaatttgttgaaggaaaatagtcagctaaacaagacctacatgagtgggggtggggtaaaggcacctcggagtgcatgctgggattagggctaattaagatgttgactgaatctatgctaatcatgtcccaccagactctgctggattagtatgtaaattggtaaactctgttctgaaattgccctaccagctgaggtctaattactgactagacataacaaataataatgggatttgtattttaggatgtttaattatggaaatatatgtctggaagaaataccagctgtattgcacaaaaagagaattcataatgttttactaaagttttatgaaattttacacctttaataagagcaccaggaacaggggtgtgtggggggagtcttttcggagacctagcatttgtgaagggggaccagaatcgcaatgattaattcgctgcttgagtaatttccccaaagctcaaagactgattgtttcagtgccgatacacagcatcttgtgagcttttagttgtatcacccaaagaactggaactcatccgtgaagaataaccaagatgccatggatttaactcaactactccatagcatgcattcaaatggaattaaaagcaatagggcaataatcgttgcaggaaagtaagcccctaaaacaatttttcttcactgaagttactccataatattgaaatcattaaatttataaatcagaaaatggttagtccagtcctgaagcaaaggcatgtattgcatggttttagagaaaagcagcttgagctctagaattcactgaatacgcatcttgggacagaaacttctttgcaaccatttattacatcattctgtgacccaccctttccaaaaagtaacatacaaagagttataaacagagttttggtagagctgtaatagctgcctgtatttgcttgccatagtgctattactcacataattttaaaggcttatgggtgatcattaaatctttattaggttttacattataaaataaattattcatgtcgttctaatacatactggtatctttacagcccttttgcccacatttggataaacaaatcctatttgcatatcatttttattttaatttaaggcaattttgttgtgaaaatataaggcttaaatgcctattatgttccaattatgttccaatttcccacacttttcttggttctatacagtactttacaaataaggtaaagttcacataatttaaaaagacggatgatttccttttacttagaagttttagaatgtttgctcttgctgttatatggcaaggcaatagatattatcaaataaaatttagtgagcaagcttgtgtttgcagtagcttcacgcctctgtacatttgaagttacacatgtatatggaaattaaatttgttgatcactttaacaaatttgtgaattagcaaaaataaagcactaatttttccttgtggtacagaactatagggaagaataatacagtattactttgatgtaaggatatctaacctttgtattggtaagtcattgaataaaataatttttcattaagggcttatgctattagtctttgcagatcttatcagcacattgataactgtatttatttaggtttcaatagtagattttagtttcttgtttcgttagtcttagaaatctaggacacggccgggcgcggtggctcacgcctataatcccagcactttgggaggccgaggcgggtggatcatgaggtcaggagatcgagaccatcctggctaacaaggtgaaaccccgtctctactaaaaatacaaaaaattagccgggcgcggtggcgggcgcctgtagtcccagctactcgggaggctgaggcaggagaatggcgtgaacccgggaagcggagcttgcagtgagccgagattgcaccactgcagtccgcagtccggcctgggcgacagagtgagactccgtctcaaaataaaaaaaaaaaaaaaaaaaaaaaaaagaaatctaggacacgtttgattccctgatggtggatgaataaatctgaacaaactttccctttcaacatcatagtcagttctcaccttcaagcattgccattaagcttgcatgatgtcatcctgtaggcaatgtatcactaaaaacattattttaaatgctattttcccatgccccaaggcacctgtcagtaattatatgttattttctattaaaactaattgtgacccactctcagcattgaacccagggtcagatactctggtataataattctagctttgtcctcttcttgtcatgagtattgggtgaagtcagagtgctgtgagaacatttagaaggttcacagaaagtgtttcaccaacacataggtaagcagtgtgtaagcctgaacagatgtcaccttgaatggaaatctttcagggattgggtagacagctatggtataaatctcatattttttgcaaatctcactttgaagcaaattctacaattccagagagtaatcttttcaacaaatagactttgaaatcccctctctatctttaaggcaagctgtagattatcttgataaatagcaatattgattttagcatagagataattgccccaagatatacctaccattggtcatggggatataaccaaactctcctagtttgctgttccaaatgaagaaatatggagtccttcctcagtggctttgaatatctgtcttagctaagtaggttaaaggacatgggagcaagtcttctgggctgagacagaagacaggagttcaagtctagctgggccattctctgagattctccttcttccactgtaaagagggtctttccgaacaagaattgcaaggaacaaatggaataaaatgtgtccctttcacatagtagataccaaataattgtttgttaaatacatgtctagtagaaaaggttaaatgtgaatctttctgttacacaaattaaaaagcaaacttaaatggcaaggtctcatatcttcctggtgatctggctataaaagaataaaaaccacattcctttcagtaatatctcttggtaagaaatttattacctaatgattaccacagtgctttttaaagcccataagtaaatagtctataattccatattatagcttctacaaagatacagaatattaaagaaaataaaagagaatgtaaaaaaaaataagtttacatctatctttcttggcatgattttcttttaaagacccacctatattgagtgatactgaaatcttcacacgcccagggcagctccacccaacaactagtcaatgataatgataatgaagaacaactacgtcaaggtatcaagatcttacaaaatgtaagcatcattttaggattcctaaggcatttaaaaattttattcaaagggagctctgtcccaacattctttaaacacacacatagcagagtgagagaccttgggattcaaatttcaccctgccattattttatagtgttgttggaaatgggagaatgcaagtgcataacacattaagtcattcaatgaatgtacacaatggctctgcatcccatcatcttgaccttcttattgccttgttctttcccactctcttttagaaaagaactatgctctcacttcatatttatccagagggccttggaaccatttaatttttggtcatctattttttatgattgcaatatggttttctcagtgtggttataaattcttagacagcagggaaataagaactttctccaattttgccctgatgtccaggcttccaggctaatgctccatataaatgttttattttgtcatggatcacaccctactgatagccaggcttctacaggaatgtgcctcagaaaaattcacagttcatcttgatagcagtaattgctaaccctgtggtttgctcccgcccccattaaatgtacaggtagctctcatactaaatatctcacaaaattataattgtttgttaagcaaggcagtagagtgtaagaattaaaaccatggattctggaaccagactacttgacttcaactgccttctctctccttacaaattgcatgatgttgggcaaatcacgtaaggtctccttgcttcagtttcttcatcagaaaactgagatgataatgttactagtgtctaccaaagagggttgatatgaaaattaaatgtagtgtgcttggaagaagctaaagtactcagtgaatatgagttattcctattattattactggtgtcttcacagatgggcttttagcttcttaggagaaaaggtgtttctggccggtgttctatccccaggtcctagtgcagcatacacacatcttctcagagtcccccatcctctctacctccccatcatctacctgagatatccaagtcacaaacctcttcctctcagctgtcctgccaatgcactgtccttagtatttctcaaacttcttgtccttttctctacagattctctcagaagtcatgttctcgacctctctctcctgcattccaacaggcagcctagttgggcctccatctccatagggctctctcagtgagctttctaacatggaaacctgatcattttcatttcacctctccacttgaaatatttccatggctccctactgcctacaagatcatggaataaatacatatcaagttaatataaagaaatttgtgtctgggcatggtggctcacacctataaccctagcactttgggaggctgtggcaggtggaccgcttgagcccaggagttccagaccagcctaggcaacatggtgaaaccccatgtctgcaaaaaatacaaaaattagctgagcgtggtggtgcatgcctatagtcccagctactcaggaggctgaggtgggaggatcacttgaccacaggaagttgaggctgcagtgagccatgtttgcaccactgcactccaatctgggtgacagagcgagatcctgtctcaaaaaaaaaaaaaattgaaagaagatgtggtagtcagaacaatgctccccaccaaagttgtccacgttctaatctcccaaacttttgtatgtgttatgttacatggcaaaagggaccttgcagatgtggctaaggatgtttaaccacatccttcgacatccttcaatatggttagatctaaggatgcaagatgggaagatttccatggggtcacctggtggccccagtgtaattgcacaggtccttatagtggaaagagggaggcagaagagtcagagaaggcaatgtgacgaatgaagcagagtcagaaacatgcagcgccatgagccaaggagtgccagaagcctcttgaagttggaaaagcagggaacagattcttgtctagagccttcagaaggaatgcaggcctgctgataccttgattttagatccattttgtgcttcagacctccaggaatgtaataaaataaatttgtgttgtttaatttttttttgagatgggcaggctggagtgcagtggcatgattatagctcattgcagcctcaaactcctggcctcaaaggatcctccctccttagcctcccaagtagttgggaccacaggcatgtgctaccacacccagttaactttttattttttttgcagaggaggggtttctctatgcttcccaagctggtcttgaactcctaggctcaagtgatcttcctgcctcagcctcccaatgtgctgggattacaagtatgagccactgcgcctggccgtgttgtttaaatttttaataatttgtggtaatttattacagcagccatcggaaactagtacacaaggcaattggatagatagtgctgactaaataattgtgttgcggtaaatgaatgactatactatgagagtaccagactaatgcactgatatatttagaattctttttattaatgatgtgttatgattttctttccctcaaccagtaacttcagatgggggtaagggatgcatttttctacaactccatcctgtcttctgctcacctgctgggggcagaaagtgaggctgtgtcggtatagaaacctagatctttatacaagcagatctctatacaaacaaatatgtcacagcgtacatgcagaccggggctccctactggatagctggtggaaaccagggcaggcatggccagaaaccaaactaaaccaagtctgtaatttctcttaactgagcaaatctaaaatactgtattctgtattttaacctaatatgatgtttctaccttgatgtttcaaaagccatttttacacgtaaatacatatggtgcctgtccaatccatagttacatgtgttggctctctgatcataaaggaagatagggaacaggcagaagctgtcaagggagattctctggaagcattaaggtaagctatagtgagttctcaattgatacgagatctgggaagaaagacatggctggtaagagagcaatatagaagtgtgctaaaaagtgcttttgtggagcagggaacagatttgggtttgctaccttagtagtgtggcatgaatttattcttaaattctctggtccttcattccatcatctttaaaatgggcccaataatacctattttgcagtattgttgagaagagtaaatgataacatgcttgtaaaggggccagggcagtgtctggtatatggtggattcaagacatgttcatttctttcccatgattcttttttcttactgacattattgcaaattatgtgtattattatgatatatcaaaacatttaacaaaagtcatctaacagaaaaaactaatacatcaagaaaaaaatgagaaggaacagtaatttataagctctaaagattaaggatgctggaatgttttgttctgtattttcccaatttgtgcaatggcaaggttaattcacgagaaacctttcttttgaattatttaaatggccagtgatgagaataacacacagtgggtcttgtgcaatgtgagagggttattgattaactcagctcacaggttccaagtagccagtaacatattttaatgtatcaataattcagaagaattaagagtttttcgttgttgctgaaaccacattcgcaactgaaccacgggagctggcaaacaattgttagaacagcacgagttggtctttcccttctagccttggtcgcctctgcaataaactccacaaaacatagctttcatctctaacagcaaacgtgtgccatatgagtgacacccaagcactcaataaatatatgccagattaatgataacctcataaggcagtagtgaaaaatggccaaagtatttcagaagatcaacctggaaagaaaatcaattctaataaacttgacgctctcaggttcaaatataataatgaaggtaaatagtctttataaccagaatgagcatggggtggagaatagtgaataatgttgatcaaaacctgaaaacttcacagttcacagataaattgattaactgttatctcacactcaggactcccaaattgactgccagcattccgtaaacaattcctaaaggcaaagataacatcgtttggttgaattagcattttcagttgagaaaagaataaaaaactgaaattgaaagggaattgactttcattttttggcaaaggatatctcaggcaaataattatttcattttaaaagaaaaagcatatattttttcaggttttcatatcaatgtgcatgcaaagaaactgtatttaaatagtttataacctgtagttgaaacctatattttataacctatagtttaaataacctggttgttattaatgaaataaatggcatgcattttcaatttttgaatattctaataagcacatcatcttaagactgtagaattaagtaaactgaagtaacagttgcagacttgaataatttgtgttgaatcattttacttgatcagtgttttcatgatgggcagattcaactgaaatgataataagtgtattggcatatgttaagtttagaaacaaaacatccatcatcagaactttgcatttagcaatgcttctagttttattttaatgaggaggaaaaaatgcagagagccccctaaattaggcagcactcaaattttctcagggcaaaaacaacaacaaagattaccaccctgtcttggggatgggggagggtgcgcagagtttttaggaatttggttctcagctatgaggaaaggcttctggacttgtccatcacagaaacaacagctgtctgccacttctctcttcttcacacagcccccaactccaaacacgcctctcagaaggacttttgtagcttgcttaagggataatttgcttcagactgaatcaatatatttctaaactcttcaggctcaagtttgccaggatatgataaaaggatatatttatatgtgtgtgtatacatatacattttaaatatataagtaatataaataatgtattctatatatatcttcacacaaatatgaaagtcagctctagaaataacagaatggaattagggagtaagaagcaacatttgcccaagaaggctgtgtgcatgagctgattctttgaaaatgttgaaggaaacgtgtacctattctttctgactctagggcagcttcctcatttcttctttccaattagaactcctctgcatacagacaaagaatataaagttcttcaagttccattttcctcacttgagtgtgaacactctcccctcctttcacagtgtcttgaacttgcgctaggtactacttggatttttaacagtggcttggatctgaacggctcttgttacaaaacaggtgatacatacaatggcaaaaatacattctcacaggaaacagacaattgaaaaatttccagaaggaccgggtttttctctcactctcctgaagttgtaccccccaaactaatcaaattgagatagaaatgctttaaagatccgagtatctgatagataagtgcattcctctatggggtatagtttttgcgtgggcatgcgttttgcttaagtcagttgctcagaagtgatgctaatcaagtttgggaaaagtaaaattgttctgtggctaccagccctttgtaccagaaacagcgccgtcctcatacaccagacagagacgatgcaggacgtccgcagagtcactaaccaacttccctcccttctgacccctgcgcttcagtaaagcaattacagtagcatcccagagcagtagagaataaaatgagccttaccagtttctcctagtgtggacgaaaggaaacaacccctcagctgctctaggccaggcaactgggtctcagacttacttgactgaggggactctgaaagctgaagtcttccttccctctgtttgatttcttcccagcaacctctcccaggatttttctcacaaagcactctcctattctctaatcctctcacaaggaaaaccagcacacacaccaaatgacttctgcagaagcgcctctcctggggagctaggaggggaggggtggaaggggggtgtttgctggcattcattcctgccaggcgaatcctcagggagtcatggatcccagccctctggactcctcatcgactggaatacgataggtcatggcgaggcacggaggtgtgcatttgcttcttcctatatctccaaaccctggtcactatccctcagggatgggagaggggacacctcagcttcaaacttcatctgagtcttatgaccctttatactccctcccataacagagtaattccaaacgagttatgtagaaatcagctagacgcttcccaaatctatctggcacctcattttaagagcccttgacaatttatagcagctgcttgtttttaacttatccaaaagctgaaaacagattgcaaacatcaagaaaaggtggaatatcatatatgaaaaagtgatcgatatgtactatcaaacatctggaaaattactgtctttatgaaaattcatttttttaaaaatcatgtttctaaaataccaaataaaattgctaagttgtaaggcatgaccttctttaagatatggattttaccttatcttcccaggacaggatttgcacttgcatttgaaaataatattcacactttataaattcaaatcctcttctaacttaaggcaaatatcttacatatattccagatatgctataatcaatctggaattcccacttacccctccagtttttaaaaagaagacttacctttttattacgtcatttaaaaccctgaaacgaataaaccacagtggagacaagcagatggcagtcttctacattttgcaatgagggctgtttgccttggagtcattatttctaaggagacgctgctgtgcttgtgcctgtgttcggcagcatgccatttggggctttgaaacaaaatgaatcagcttcacaccaccagctccactacatactaacacttcagaatacccaaactggggcaggctgcctctttcatagtgaccctgcatagaatcagaggtgacggtttgatggatgagtttcccaagagacaatgcaatctgtgacatcacagttctggccgcaccccccaccccaggcccctgtcctgcctctcctctccagaaaaaaaaattgcctctgcttggtgacaatgccatctcaatagcaaaaatgagtctgaggtgcatagcaaatgctataacttagctatctttcttaacctcagttttctgattcccctttgctggagtaatgggagtaggatgagatgaacatactaggcagagaattcagacaaaaccaaacaaaagcacagaactcaatattctaaaaagtttgtaacatgatagcagaataataaccttcaaaaggagcactactgaacactagctcaatgatactaatatctttgttatacgcaatttaagacattttgccataaaattatatgtaagcaactacaaaaatacttaaagtgtctatatcatgtgtttcagccttactagaactcatttagcatcataattttcttgatataaaatagtttcctttccctccttttccttggccattttgctctattctcagttgttctctgtaccagtacctgccaccggtcttaacatttaaaataatacctggataatccatttgaattttggatacaaacttacttgtgagtaaaagctctaatatctttctgactctcaccatcacctctatccttttcacctacattcatctcagatgtccagtacaaagagagtaaaaaatctagaagatatttatgtctgtatctatagctacacctatatatctctatgatcaataaatgtatctacataaacattttaaaaaccttttccatggcaaaataaaacagcatatgtcaagtcaaaagaaataatgaactgggacagagggcccatctccttcatgtttaatgaatgcctaaacttggaaaagagaaaaaaacctaccacccaaaagaaaaacgggcaaaggttatgaaacaaaaggagacatataattagtctttaaatgcatggaaaggtgttctttctcacttgcaataaaatcaatgtaaattaaaactacaccgaagtataatttattgcctgtcagagtggactaaattcaaaggtttggctcatacaccattgatgaggctctggggaaatgggcacttttataggttgctgctgggagtataatataccaccaccaatctggggttgggggagagatttggcaatctaacaaatttatagatgcatggacccttcctcccagcaatcccacttctaggcacctattctacacaatcaccagagaaagcaagaaatgtcatattttcaagcaatacaaggaacccacacaaatgggcagcagtagattgactaatctgtggcatatctatatagtgaagtactatgcaatggcaaaatggaatatcagatctctatgtactaatatagacagatgcccaggcaatgaaaacaaagtgctgaagagggcatggggctgagggaaataagagaggtgcagtgggaggatgaagtctatatatgcataggcttgtatttgcaaaaacaggaactctcgaaggatcaataagaatctaataaagatagtttcttataggggaagggaaggattgtggttaaaagggcagaaacagacgtgagattcctgtaggtttactcatcctcttatgtcaggagtgggcaaactatggtctgagggccaaatcgatcctttgcctgttggtataaataaaggtgtattagtacacagccatgtccgttcatttgagtattgtccatggctgtgtttgtgcaacaatggcactgttgagtagttgcagtattgaactgcttggtccacagagctgaaaatgtttactctctggccctttccacaaaaagtttgttgacccctattgctgtgtaatgagttttagcataagtcaagagacaaactgaagaggatgggatagacttccgtggtttctactttaaaagatcttaagttgagtcctggctgtctctgcctcgttacttagctttcttcgacttgctttcttcacctacaaagtgatgaaggtaatgctgaccccttggttttgttatgaagattaaatgaaacaatgaaaacaaatgtgaaagcaccttgtgaactactatacaaacctcagatattattattactattctttatgagaaggtgacaggtaatacacacacgtaattagtaaagaattagaatagccatggcacttaaaaactttgcagcacttaatgcaaaagcattaccttaaaacttgcatctacattttaaagcaacaattgtatcagctatggtcacatggtaactcagctcttcctattctccacaaccagttaagccattgtatctgctcatctgacaacactgattcagagtgtaaaaccctactcagggcaaggtcttcagactgcagtagaattatttagccttcagagagctcaagaaaaatttctaggcttgaagatacgtatctttacgttcttgaagttaaaattcatcagataaagttatcttaccatgaagaggggtatattagtgaccaagggtatttgggaaccatctggggattatatttgacaaatatggaagcagacttcagtaagactttcaccctcaaaattcgtgtttgcataatcactttaaaaaatttaaatgtttgaatgtattatctttaagttaaaagccagaacttctttatgatagaattaccagttttgtggggttttttgttttttgttttttctatactcagtgatctttccttttcagtcatggaatttgtagtgattgattttgccatagcattttaggtttaactatttttaggtcatacatatttgtgaactactaaactacgttaaattgaactgccaaaagctcacatcaaagttccttaaaatattcatatcctttggcctgcacttctacttctgggaaataatattgaggaaataaggtggctgggcacggtggctcacgcctacaatcctagcactttgagaggctaaggtgagccgattgagctcaggagttcaagatcagcctaggcaacatggtgaaaccccgtcactaccaaaaataaaaataaaaaaatgcactgggtgtggtggcgcggcctgtattcagcaggctgaggtgggaggatggcttgagtccaggaggtggaggttgcagtgagctgagattgtgccactgcacttcagcctaggtgacagagccagaccctgtctcaataataataataataataataataataataataataataataataataatgctacacacactattgtgttcacagacgtatatatatgtgatgtttgtattaaaggcaacaacaacagcaacatcaaaacactttgtgacaataaaaatgtctaaaattaaggaattggttacaaaaattgtggtatggtcattcaaaggcctatcgctagtccttttatctactgctgcataacaaaccacctggacacttagtggcttaaagcaagccatgtgtattttgctcacaagtctgtgatttttggaagggctcagtgggtacagccacctctgccctatttggcaccagctgctgtggctcgaagtctagaggctgcagtcatctggagactcgctcattgcgtggctgacagttgatgctggttgttgcctgagacctcagtgggagctgtcagctggaacatatatatacagtttctccatgtggcttgggctccctcacaacatgctgtctgggttccaagggtgaatgttctaagaggaggctaggcagaagtcatatcaccttttacaatctctcttggaaatcacatggtgttacttctgctggactgaggcagtcataaaacttcacccatgttcaaggtaaggggccatatattctacctcttggtggggcatggtgaggttcagaaagtatgcgggggcgaatggaaaggttgctgttgtcattttggagagtacaatcacttgtaattatacagtcattaaaatgatatagcacatccaaatttattcacacgaaaggacattcaaatgatagtgaatgctgagttggcagtgtagctatggtgtcattcagtagaaataacactggcacttaatagacactcaataaacatttgttgaataaacctttgtgtaaaaacaaataatatcttttgtttgtgcctatagtgaaaacattctgtgagaagctacatcaaaatgttaatatgagttgggcacggtggctcatgcctgtaatcctagcactttgggaggtggaaatgggaggatcgcttgagcccaggagttcaaaaccagcctaagcaacatagtgagaccccatctcaataaaaaaaaatgttaatattggttatatttctgtgatgggattgcaatttaacttttctaagattgtgagcttataatattcttataataaatgtgcatagaaaattaaactgtatttcaaaatgaacctcagaggacaataacctgagttgattgtcagaaagtttgacctaatttcttttcttttcctttctttttatcttttttttttctttgtagataattgaaacctaattattatgctccctggcaaagcactttttcttttttctgcttgtgggaagaatttattgttcagctatctgtaagcatttaattgctgcaaagtatttaacggatgtaaaaataaaaattttatttttcatttgtgtaacacaagagcaccagcaacataaaatgcattttaaaaaagatagctcgttaaaataaatataatttgactccaaattagtcatacctcagtgagaataataaataaactcacatttaaatcagtgaattagcaggatatagttcaatggagacaaggatatcagaaaagaaaaagcatggtgttcatgtaatgttctatgctgtactctcactaccttttccctgatcattaatattttaaaaaatatattaaaatacaacttatttttggaagtcaaattgctaacttctcgtataacaatactttgaaagtgcttttaaaccagcttctagaagttatatatggacaaatttgaatgtcagattacctctctggtaagagagcaatccacaggcaaagggtcaaatctggggcattgggtggaagttgattaaacacacagtcctgaaataatgagagtcatttgtgtgaaactagaaggagagtatagctttaactgaacttatagaccagtttaacagtaatcagcttttagtcaactttggcatactgtgctcaattgtagtcattttctcttccttgatctcaactgaaatctctcatactttacgtgagagctgttatttcaacccttgaaaggtcactcttctgaaagaatgcttggatgaactcagccctgattctctagaaataaaaagtttcacttcaaatgtttctatcaactcttaatgacagaatcattaacatctggcctggcatggtggctcacacctgtaatcccagcactttgggaggctaaagcaggaggatcacttgaggccaggaatttgataccagcctggcaatatagtgagccctgtctctacaaaaaagtttaaaaattagctgagtgtggcatgcatctgtagttgcagctactcgggagactgaggtgggaggatcgcttgagctcaggaggtcaaggctgcagtgaggtatgatcatgctgctgcactctagcccgggcagcacagtgagaacttgattaaaaagaaaaaagaaaaagaaaaagaatgaatctggaagctactgtctttggtcctcctctttggatttggaccttctctcattattcaattaaatattacacgcacagagacataaacacacaagcaagtactctgtgatttaacatgtgcttgtaggagttgaagactaagttccagccattctggaagggcaggagatgatctgcacagaaggaattgcacgtcatcttttttttttttttttttttttttttttttgaggcaggctctcaggctggagtacagtggcacgacgttggctcactgcaacctctgcctccctggtttgagcaattctcctgcctcagcctcatgagtagctgggactacaggcatgtgcacgacatctggctactttttctatttttagtagagacggggtttcaccatgttggacaggctggtctcaaactcctgacctcaagtgatccacttgcctcggcctcccaaaatgctgggattacaggcatgagccaccgtgcctggcagcacttcatcctttaaaaaagattttgtttcgttttggctttttgtttgtttgtttgtaagttaactgctttaaggaataaatgctcaatgtagaaaatgtggatattaaaagatctatctaagaataaaaatcacccataactaaaaaatgaagtgacagtcactattaacagtttgatacacatacaggcagatagagataaaattcaactagttgggtgtatagtggaggtgtatatatttttaaattgtgccgcttgcttgcttgcttgcttgctttctctctttctttctttctctcttttcttttctttctttctttctttctctttcttttctttttttttttttgaaatggagtctctctctgtcacccaggctggagtgcagtggcgtgatctccgctcactgcaacctccacctcccaagtttaagtgattctcctgcctcagcctcctgagcagctgggactacaggcgtgtgccaccatgccggctatttttttttttgtattttttttagtagagatggggtttcaccatgtttaccaggatggtctcgatctcttgacctcgtgatctgcccacctcagcctcccaaagtgctgggattacaggcgtgagccaccgcgcccggccaattgtgtctttttctaagtgtcattactttggaatatgtaacaactttattaggtaaaatgtgcatattataaaatttacccatttaaaatgacttttagtaaatttgacaagttatgtagccatcattaaaattcaggtttttaacacccagtaagacctcttatgcctatttacggttaattcctgttcccaccccaagccccaggcaactccttcctgtctctatagatctgtttttctggacatttcatataagtggaatcatagtcttttgtgtttgccttcttttactaaataaagtgtttttgaacttcatgttgtaacatgtatcattactcctttagtgtttattgctacatagtattctattatatacatatgccacaacttctatctttttaaaactaaatatcatgtcatgaatattttatgtcattaaaaatttcatgtaaattcccatttcaatggccataatagttcattatactataaagtattaattttttctattgctgtgtatttactattgttgggactcagaaaacaataccccaaaatgaaggcctcagaagcaaaagtttctctctgaccttctccttcccttctgtctctcagtcacattctcccttgaggctagccatagaaactagaatccttcttccccaaggtggatcatagaaaccaaaactgcttttccccaaagccagccataaaatctaaaaatatcactctaactttccctccaccttatctgtgtaaaaactggccataacgaaattccctgacataccttgtttgactgtaggtcataacacccccattccagagagggtcttgccttacacccagaaggaaggaacgctgctcagagaggccaagaagaatctagacagacaggccttgctgggtttccacactcagtccattagctttagatcaggccctttttgtccaaccctgtttctacacgctgtccgtgctttgttgaacctaagcataaaaatggataatttcccctgtatctttgggccttccttctgaaggctcctatttgtatacattaaatacatttgtgtgccttttctccaattaatctgtcttttgtgagttgattttttcagtgaaacttcaggggacccctcggcccctacaccccacatactcatacacacacacacacacacacacacacacacacacacacacactcacccctacctgtgtagtacaagatggaaagaaatagggtgggatgcagagacacaaatccaaaattaggtttctatccagtggaccagtggatgagaaggtttgtgtttaacaaggatgtgtctgtgcctcttgcagtttcatgagaatgtgagccatctgggaatctggttaatgtgaagactctgatcctgtgggtctggggcattgggatgtgagtcactatcatcaccatggctcagagtctgtgatcttgagagctgatggtggtgctgaccatccttctggggaagggggtttggtgtcaccatcaacccttaaggctcgggtgtgctggctgggcagggggctgtgtctaaggggttcggggtcaatggattaggttccaccttcttcatctcttatatgcccaagagactaggcttcatcatcaccaatatcttctgcatagatctagtgttggtcaacatggatgactcacttccaggtttactgagaccagcagcttcccacatacattgactacctttcttatgcccacaacatggcccccacagatgtaaaactatgatcaaataaaattgtatgccttttctcctattaatctgcctcttgtctgaaattttcagcaaacctccacagggcaagggtaaagctttcccttagtcccaacactattataaaaaatactttgttgttgcagattgaggtctccagaaacacatgctgaggtggaatttggggtgaagatacttactagagatccacatcagtaaagagaagggggaagaagcaagattgggcagacaaagcagccaaactgcaatccaggccctacaaatccttggacaacctggctgagagctctggaacaagcgttgcagatcagaattgtctcatgtgggatatagatggttgtgtctttatgtccctgtctttctcaggcatcagatgcaggctgctctgggaagcaggggacattgggtgaagtgactctctataattgtgcagcctctgagctgtgaccttatgggtggaggtgtctgtggaccccattccaggagtgagatagcaagtccttccttggaaggggatcttggcagtgcatctttgtgtttgcccaacccttggaattgcccgtctaatatccactgttacctttattttgactaacagaacacccaaatttcatttgcagctccggtgttttacatattctctgccctgacctccttcagaggtaggaaggaccaagtaacatagttgggccaaatagatagagccataaatttctagataattttatctagacacgataattttatcaataaaagagacaaaacctcccaaggatgagtcttttgtctcttaaatttctccctttttcctgcctggaacttgagactatgaagacaaaagtcagcctaaagaaggcagggcaagaagctacctgggtgattttctcaaacaactgtatcggcttgggactgccaaatgcctggcttcttgcacgagaaaaatacccccatcaccttcttttgttcaattcagtatggtagggtttctgttacaggcagccaaatgtagtcctgtctggaacagtatgttagatatgttagcatatacagtagatgtgcatttgtgattatttctttcagattgagtccaagtgagaatggtgagtcaaaatatttttaaagttctttgtgcctattgcgaaagctttacaggagggttttacatattttattttaatcagtaggacatgagattttcttactgaattatgccaacattaaacattttttaaaaagacagggtcttgttctgtcacccagtctggagtgcagtgacgtgatcatggcttgctgcagccttgacctcccaggctcaagcaatcctctcacctcagctttctgagtagctgagaccacaggtgcttgccactatgcctacctacttttttttctattttttgtagagatgggggtctccttatgttgcccatgctggtcttgaactcctggactcaagtgatcctcctcccgtcgcttccccagagtgctaggattacaggcatgagccactgctcccagccaatgccaatatatttttttctttttgagatgagatcttgctatattgcctagactggtctcaaacttttggccttaagtgatcttcctacctcagcctcctacgtagctgggattacaaagtgtgaggcacgtgctggctaaacatttttttaaaatctcttttattaggagaaagaggatagaatcacattgcattcttaaatgtatacactttgataatttatgaggttataaaatatttttatttccttttctctaaattatctattcaaaagtattttttcccatttttgtaaccagcattttggtacttttcttattagtttgagctctttatataaggatattacttctatcctctttctgacaaatattttcctcctttttgttgcttgccttttaatttcattcttactactttttatctttcagaaggcagaaaattatgttcacaaatatagcatcaactgttttgttattttgtctacggtactcacacctagaccatccttccatatttagtgaacaaagaaatgtacaaatcaattttgtctttttaaaataattttgctttttttcacttgattattgaattcatctttaattagtttgtggcatgaggtgagattcaattttttttctcaaacagccaattttcttcatacccatatgttgagtaatctgatggtatatgttaaattcatatactgtattataggagagacaatgccatatgttaagcaaatccctgtctctttcccaccttggcacatatgaattgagaaaagaaaaagttcagaacagtctgagctatgtgaggtctgcaaaatttatcaggccatacactgttctttgtgtcacaaaaatacctatcctctggcttttttctgaaaaagcttgttaaccgctggcctagtctgtatttatttctctatcttatttggtggatggatgttgagtatccagcagaggattttgaggatctagcaggatacagagctactagatggagggaatgtgtgccccatttgacagaatgggacaaagttccctaatgacttcactgaattctgattagattatgttacaccactgaggtgttcagactttacatgtgttaattatctgtatctgtattagttcgttctcacactgctataaagaacaacctgagactgggtaatttacaaagaaaagaggtttaattgactcacagttctgcatggctggagaggcctcaggaaacttaacgatcatggtgtaaggcaaaggggaagcaagcacctttatcacatgttggagcaggagaaagagagagggtgaagggggaagtgccacactttaaaatcatcagatctcataaaaactcacttactatcacaagaacagcacaggggaaatccgccccatgatccacctcacctcccatcagttccctcccctgacatgtggggattacaatttgacatgagatttgggtggggacacaaagccaaaccatataaatatctatatctatgtatatttatacctacatttatatctatacctacaccaaaacttatgtccacacctatatatccatatctatacctaaatctctatctgcctgtctagtctttttttctgggctttgtattctagtcttgtgatatcaccgtgtttcaaatgttgtagattttttttttttttacctcttcctctccccttccaaatgtagatttatagtgcctcttcatgtggtagggccaatttccttctccttacacattttttccccttttattggctgtgctttcatgtcaattcttttggcctaactttaggatcattttgtcaatatctggaaagaatttcattgaaattgcttcaaaagaatttaattagagaattgggctaaatcctaaaagacaagtactctttatagacagagaaaataacatgtgtaaaaacttggagtgtccagaaaacaggaaatttggagtgcttgttaactcttggattcatgtctaaggagtgacaggaaatgaggggcagggtgggtgggaggcaagttatgacaataccaacaacaatgacaaccctcagttagactttcagctaactgtaatcaagatgctgagagttgttcaagcattacctcagttaatccttcccaaatatctatgaggtcaacacgatttgcaactccatttgacaaaggagacttgggctttgaggtgttaagtacctggctagagatctcttggctagcaagtagtagagtcaatattacaattcaattcagcctgacttcaaaaagcagtatttccaaaccgggctaaaatgattccaatacatcatgtatgcaaaaagaaaccattgaaagattataagaagagaatcgtaagaagagatttgcactttgtgacaataaggctgttagcgttatccttctaaaatatgaattcaagaaactaggtataatggtggctactttagcaacatcatattcctactgcttgtataattgaaatcttaatgaccagtgctcaccaccgacttcagtcctacaatatgtggttaccaagcattcagtcaggcttccccttcaaaccacttactacatttgaggtgaagtctattctttgggttcaggtcctgtgtgatcttgggtgaatcactgtacctcttggtgcctcagtttcctcacctgcatactcagagggagggactagagatctgtaaggcagttttcccaagtactgctccatgtcaaaggattccctggtctaaatcgaaatgggcaaaataagaaccatatacagagttgttcttggaaggcaatttattcaatggaaaggactctcttttattctgagattgtaccagttacacttttgtgttgttaggcattctttttagtgctttgaaatgatggtgatagtggatggcatctctatttgtgatggcttttactggaatccctaccactgtctccttgtgatttaactcacaggcccaggatcctcaggagtgtgggaactacattctggcagtcttctaatacaatattttagctcagtgctgtctaatagaaaaatgtgagccatatacagcatttcaaattttctagtggccacattataaaagtaggaagaaacatgaaattaattttaatagtgcattttatttaactcaatatatatccataatacaataattccaacatatagtcaatataaaaattattcatgggccaggtgcagtggctcacacctgtaatcccagcactttgggaggccaaggcgggcagatcacctgaggtcaggagttcgagacctgttgtgggaagtcagggaccctgaatggagggaccagctagagctgaggcagaagaacataaattgtgaagatttcatggacacttatcagttcccaaaattaatacttttataatttcttatgcctgtcattactgcaatctctgaacataaattgtgaagatttcatggacatttatcccttccccaatcaatagtcttataatttcttaagcctgtctttactttaatctcttaatcctgttatcttcataagctgagaatgtacgtcacctcaagaccattattgtacaaattgattgtaaaatatgtgtgtttaaacaatatgaaatcagtgcaccctgaaaaagaacagaataacagcgattttcagggaacaaggaaagataaccataaggtctggctgcctgcagggtcaggcagaatagagcatatttttcttctcacagaaagcctatagatggatgtgtgaggaggagaaatatcgctgaattcttttcccagcaaggaatgttaataattgataccctggggcaggaatgcattccttgggggaggtctatgaatggccgctctgggagtgtctgtctcatgctgttgagataaggactgaaatacaccctggtctcctgcagtaccctcaggcttgctaggattgggaaattccatcttggtgaattctagtcagactggttgtctgccctcgaaccctgtttcctgttaagatgtttatcaagacaatgtgtgcacagcgggacatggaccctcatcagtaattctaattttgcccttgcattgtgatcttttattgccctttgaagcatgtgatctttgtgacttacttcctgttcgtacaccccctcccctttcaaaatccctaataaaaacttgctggttttgcggctcgaggttgccatcacggtcctactgatgtgagatggcacccctggaggcccagctgtaaaattcttctctttgtactctttctctttatttctcagaccagccaacacttagggaaaatagaaaagaatatacgttgaaatactgggggctggttcccccgatagagaccagcctggccaacatggtgaaaccccatctctactaaaaatacaacaaaaattagccaggtgtggtggcgggtgcctataatcccagctacttgggagactgaggcatgagaattgcttgaacccgggaggcagaggctgcagagagctgagaccatgccattgaactccagcccgggcaacaagaatgaaactccatctcaaaaaaaaaaattattcatgaggtactttacattctttttttgtagtaagtctttgaaatctggtgtgtatttcacacttacagcatatatcacattgaattcactatatttcacataccccatagttatgtgtagctagtggctaccatattgaacaggtcaagtctagaattataattcagaaaatagtgtagcttcaggcatcttatggtggtttttacatggctcaccttcaacatgttggtttttcccagagcttcatatttctttctccttcagtctttagttgaatgagacaaaaggatagttcgaaggtaactaatcaacacttcttccccaatgatgagtagaaactgaattcactattccttcccaccaactcttcctctagcctgacttccttatctctaacgatcctgtttcaagtagtttacatattccattattttcctgcccttaaatttctatgatgccccctctgatcgatttgtttataaaaaataaattttgtaagaaagatgcagtaagtttgactaaacacaatatatactctaactaatttaaggtgttttaactttttttttttttttttttgagatgagggctggctctgttgcccaggctagagtgcagtggtatgatcatggctcactgcagcctcgacctcttgggctcaagtgatcctcctaccccagccttccaagtagctgggaccacaggtgtgcaccactgcacttggttaatttttttttttttggagacagggtctcactgtgttgcccaggcttgtcttgaactcgtgggctcaagtaattctcttgcctcagcttcccgaagtgctgggattataagcgtgagccactgcacctggcccttaactttcacattattattttttgacatccagaggaatcctttaaaatagggatgatggatattaacagttctagctttggagaaagaaatatatattcagagaggctaaatgactatcaaatatacatagcttgagtacatctatttttaggattagacatgttgatatttaaaatctgaatgaatattaccatgtatgtatgtgtgtgtgcttatatttggttgattccttccacaagtatttatcaagtatctattatgtgctagtctactgttctagatgatgacttcacactaataaacagaaagtcagagctattcctgccttcccagaagttatagtttatttggaaaaacagacactaaacttgcgaggacagtgaagtgaatgagacctacggaatgggaggtaaaagtagcattagggaatgaagtagcaaaacctaacctcttctatggttccttggggactcactcagaacccaagagttggcataaagattattttaacctgaagtcatttgagagtcaacagatgcagaaagaagtctttgtggagcttcctttttctgactgaaagcagaaacttctgagtaatgaggactgccacagattctttctttggggcagcctctactcccaggagagagacaaagagtaaacctaccataaattccctctctgggggagtttcatggccacgaagaagatggaaacaccaatctcacttatataaacaaacattatcacaaactttcttctctcctgttggttttcctaaaaagccgtttgtttcttttaaataagcctatttgttctttccatagaagccttttctccactctttatttcccctaacaagctaggtatataagccccaaattctaaccacccctctgagttatacatcactgagcactcctgcatgcacaatgtgtgtgtaaataaattctgtctcttctgttggtaatctgttttgtcagtttaaatttgcaagtccccaggcaccaaacctaagagtgtaggggaaaagtttttcctctccaaccatttttttccagaggaatcaacttttgcgaagggtaagtcggaattagcctagttgggtgggagggatggtggagaaagtgttccaggaaaacacttgtacaaagaccaagaaataagagagacaaacacttggggcaaaggacttgagagacgttcactagtgctggattgcgaattttacaaagcatggtgaaaaaatagatggagttgaaaaatgcctttgcaaaaattttaacagtgtgaaaattatgacactaagagaaatctgacataattgactccatcttgcccttaaactgcccttggtcctccaaatggcccttggtcattcctgggcttgggccaagctacctttgggagaaacttagtttatagtttaaatgataatagcccctccccaaaatgaaactgcccttgtaaaactaatgaaaggccaccaggttaggacgatgagaggggcctgaagtctgctaagatatagagtaggtaaatgattaccagccattatttggggggccacaagatttgcaacttccccaattactcctgtaattaacattactattatagaacctaagattggccccttttcctttttgagacaggttctcattctcttgcccaggcggcagtgcagtggtgcagtcatggttcactgcagctgccacctcctgggctcaagcaatccttctacctcagcctcccgagtagctgggactataggcacacaccaccatgcccagtgaatttttctgcatttcttgtagagatgggttttcaccatgttgcccaggctggtctcaaattcctgggctcaagcgacccacctgccttggcctcccaaagtgctgagattataggtgtgagccaccatgcccagcctaagattggccttttgaggtatcttttcaggcttttgcatttctgactattgaatgcccatcttccacatccttatgattacattcacagcccatcagcagcacctataccctagccccctgcccaccaaagtatttttgaaaaaccctagcctctaaattttcagggagtttgatttgagtaataactccatttcccacatggtgtggctggccttgtcaattaaactctttctttactgcaatgccatagtctcagcggactgatttttgtctgcgcagcaggcaggaagaacccatcaggcaattacagagttggaggaataggcaggggctagactgtgctgtctaatacagtagccaccagctccatgtagctattgatcatttgaaatgcagtgagtctgaaatgagaagggatgtaaatataaaaatacacagtatgaaaaaaagcaaaatatctccttagtaaatttttaaatattgattatgttatagtaggtggttagtcagacagaagcagggcaggagagccccccgccacacacacacaatgaggaatgtcaggcaaccatcaggtgatggtcaggtggttgttaactgtctctctaaaataataattggttatacccagtgccagggaaagacagcctcccaatacatagaaaacacctaaaactggtcatcagcagcttcctgataagatctcaggagttgggcgagtgggctcaagcatgcacactaagaggaaaaatggcagaatttaactggtatatgaccttcgtctaggatcactcgactagaaaagggaaaaatgcctcaagtgagcatgtgcatcacttcagtaaacacactatgcatgcagcaactcccaaatgctagcaggcctctgtgcatgtggacagccctccccaagggaagaagcaggggagaagagatgcaacactgaagcatgccaatatataaaaccccaggtcaaaggtcaaacaatgtacttgaatctctcaagtcacctgctttgccctcttccaagtgtactttacttcctttcattcctgctctaaaacatcttgataaactttcactcctgctctacaactcgcctcagtctctcacactgcagttatgcccccttggtctaagtctttcttctgaggaagcaagaattgaggttgctgcagacccatacggattcactgctgctgacaattacatgttgaaatgataataacttgaatatattgggttaaataaaatatattatgacaattaattttaattgttttaatgttgctacctgaaaaattttaatacatatgtggctggcattatatttctattggacagcactgctctagaccaggaagcacctggaaagctaagttaggacttgtttgtagaacaatgatgtatccaaaaataacattaactataagtggtcacgatcaacaattttcacccaactatatgctggctaatgatcaccttgtttggaacaaacaggaggctgaccttgtccataatctctgtttttaaaaagtcattattagtgcaattccaatctcagtaagaaatctttactttcttatacattggctaccctcctgcctccacttcaataggcatagggtgtaggaacacctctaggactccaataccatttctcccacttatgaaaaagttgagagattggagattcctttaattcagaaatctaccaggtggttttgctttttagttacaaaaatctgctactccctccaagaagtagaaacaaaggattcgcagggctactctcagtgggtgaaaatgctgactattctacaaaaggacaccactgccagctcttaatagctctttaatgatccgtccaagaatcaacattgaaaggactggatctcagaatgcctcagaggatgttccccaaattcatattagtccaaacaaaaccaaaagaaatattgagaaaaaccaaaagaagcttggaacagggcaattgagggaagagaattgtctccgaattagcaggaatcttcagaataaggagagaagatgatttattcatgattgcctgtgtgcattcatcactgatgacttttttccatgaaaaatctgctctaatgaggctaattaaaaaaaagctcaaatatctttactcatgattcagtgtggttgcttaaaagcacataagatttttacgaattgattgaaggttttggtctctttctaaatatctggcatggcgtctgcgggtgtcctgccagtggtggtttgtttttggagccgtggttgggcagcagggggtggctgtgtgctgacatgtggtgtatggtgattgaaaacagggtttctccatgacagcaccacagacattttggactgtcctgtgcattatagaacgtttagcagcatccctagcctctacccaccagatgccagcagcatcccccacatctcagttgtgacaatcaaaaatgtctctagaatttgactaatgtcccctgggggaaagaatcacccccactctcactctgttgagaaccactgatgtaaccccttgaaatatagtatgtagagaggcatagacttcaaagtattgatgtgggcttccccaattatttcttattcctcagtgctatgatgcatatctttaattgcgtgtttctaaaatatttctagtaagttgaacaatgatggagagagcatgttttccattgagccatgacctcatcaggcaggctgagatttgagccatggtctggagggaccatttactctggtcacatgttgacattctgatgtggtgacacctgccccccatccctgcaaccatccagaaaaaacagagaaatgaaatagcctcataacaccaacttgtgttcgcccttgaattaaatgtaaatgatgatctgccttagtttttaaaaaacggatctcatttaaatgcacagcttatgtcttatatacatagttatgtcttatgcacagctaatatcttatgcacagcttatgtcttatgcacatggttctgggcagccagttcacatttcatagtaaggtaggctgaatctatatgggcatgctattctgaatgttgtactaaaggtgattcaggaagggtaatggagcaccattttatagccagggaatcaatatcctcagtgctcccacttctcacttgtacaatcatttccccattgaaagatatcagaatatgccaccacaaaatatgctactttgtcataaggattattttgagctgaaggcaattgagaaacagcagatgcaaaaaaaaagaagaaaaagaaaaaaaaaaaaaaaacaccgcagtttcctccttcctccttccccgtaaaggcagggaatgcagggaatacattttcctttgtgaaagtgtcccctctccttttttcttgtaccagaaagaggagacaacttctattactggagatcacaagaatttaaatctgcataaacaaataaaccttactaaaataacccttgtcttccattagtttcctccatgtatctaccttcctacaatgtactgcccctagcagccccaaaccctttcctttcacttgttattttttcatacatttatttccctttgctaaaatggtatataaggccctggctctgactacttctttggggttttcacttcatttctgtgagatccccaatgcttatatgaaataaactccattttccttttaatcttttttttcaagtttagtttgcaaggccctggtcactgaatctaagaggttagaggaaaaatgatttttttccttctcaacatgatgttggccctgggaaggggccaccaaggtggatgcacaacagactaaattgacaaaacgtgctgcagttgtgcaaataaatgggactgatatcttctatctagggaaaactttataaacacttttattccaccatctggcctcagcacttttaaccatcattaaataactaaatctctgggcagctctccccttattttctataaggagttgtccttttgagaaaccgttccattgtaaactgaaggctgcagtttggagctttgaccctgtaaaatttgtttggaggctcacattggactcatcacttgttttctctggccctgtattgatagaaggggctgatctttccctggagcagttacttgagcttgcccctttttcctgagtaattatgttgtacttcttgctggtgtcacccttagtctctgtgaggcaaaataaatttctggacatcacagagtctacaaattaagtcagataatcacaaatacagtcttcaaatatgttaaagcactgtctagatctttttacggtgtgcagtttttagatagacacttgtatgtagattaggaaaagtggctagctcaatacttttttttttttttgagatggagcttcactcttgttgcccaggttggagtgcaatggggcgatctcggctcactgcaacctccgcctcctgggttcaagtgattttcctgcctcagccacccgagtagctgggattacagacatgtgccaccacgcccggctaattttgtatttttagtagagatggggtttctccatgttggtcaggctggtctcgaactcccgacctcaggtaatctgcctgccttggcctcccaaagtactgagattacaggcgtgagccaccatgcctggctagctcaatagttttaataaagttttactgtaatatagttgtaaggtaaagttatcctgcaacatagcaaaaacctgttataattttccttatatttaatgtattttatacttatgggctgtaaaaaatatgagtatagaagatagggtagccaggcatgatgcctcatgcctgtaatttcaacattttgggaggcagaggtgggagaatcacttgagcccaggagttcaagaccagcttaggcaacatggtgagtccccatctctacaaagaatacaaaaattagccggccatggtggcatgcacctctagtcccagctactcaggaggctgaggtgggaggatcacctgagctctgggaggttgaggctacagtgagctatcatggcaccattgcactccagcctgggcaacacagtgagaccctgtctcaaaaaaagaaaaaagaagacgatagaataaaaagaactttccaaaaagttctttacatttaggagagcatgacttcaaatgatagattaaggggcacaatcttatgtaattctggggcagagaaaagaggaagcagctttaagacatcttaggaaaaaaactaaatttgccttcaataaatacaattaaaggagaatcaaatttttgactgtttggaaaaaagaccaggtctctcctactctatgatgatgtggagtctacatgtgcaataataatgttcttttgtgacatcgtgggaaaaatgaatttggagactttagcattactttaaaaaatgccatctacaaacaatgttgaattatgaagacaaaaagtcatttattttggtaactaaagagcagcttacaagcctggacacaaaccattgagaatgtagtgatgaaacacttacttacttttttgttttttttaaatgtaaaatccagaacaggcaaaccatcaagctggaaaaagaaattaatataacctcacaggcaagaggaaaagtaaatactcactctaaagcagccgctgttgatgcaagcaaaggttagagcaacatggctgttttctaacaaagtgtgaatcccattagtgctgaagtgttatcccttccttagttcttacatcgcaaccagaacagatttaggattttacttccatctgcatctcaaggctggtaaataggacccatgaagatgtgcaaaagtggtgaagccattcaaaaaactttgacgtatacacaatagacagtggccaaagtctgctcaaacacccctttagcatgcttagaaggacaaaatagggagttggcctcccccagtttcccagcttcccctgcgacccccattgtctcttcccaaatacacaatgatgccattccgtggctggtaaatgagaaacggagcacttggaaaagtttctttgggaagctcagaatttaaactttgttctatttaaagaagaaggtggaattagaggagatgcggcagcagttaaaagagtaaaacatctggaagttatcaacacttgcttatttgtgtgcccaataccaaggtgatatactaattttaatattgtagtcaattggacattggttgtttattatagcagctcatatgcaaatacttgtattcatttttccctggatcaaaacctgtcaagtatgtctcctaagccagattgagtcattgagcagaaccaaataaaatcacaaaataaagttacctattctcataaagaaaactccagtgtaagaaaagctcataccttggcaaagattttcaacgtggttgcaatcaagtcattttccaattgcataagtaaataacattgaccacaagaaatattctgccagaagtacatagttgctatgatttttaaaaatgaaaggtgtaaagctaagtgttcaaattcaaaattattgcaatcatgtttctgcactgaatgcatgcagtgaacatataattatgccactctgcatttaatgcaaagaatatttctatcttaaggaaaaagtgtctaattcccaactgcacagaactgtaccaacttgccaagaataaggaaatacaaaatccactggaaataacatttggttgttcacattagcattgaagacgactgtggtttcgaaatttccctttttttaattacagtgagtaaactatttggccaactctctttgggcagctcaattttcatcctagctcactggcctgaaaatgaagctgtcaagagtcctaggttgaatttgtttttgtgagaagaacgtttagtatagtatgtcttcaaaaatcgtggagaatctgttcagaaagatgtatcttctttaaactgagtctgatgaatagttttattatacaaactgaagaagatctgtgtgaaaagttccttaaaaaatttaaatcacatatacaccaagacatattttagttatcttatttgtctttaattacacatccttatcagaatctatgagcaagttgaataaatatcactgtgtttttcgaaggcaaactcacatttgcaccaatacaaattatttttccatgttcatttaaccaccaggaaagttagttgatagttatcaaaaactctattggacagtttactcttttctacaaataattaacattatggactaaatgtttgtgtcttccccaaattcgtatgttgaagccttaacccccagtggggttgtattggagttggggcttttatgaagtaattaatgttaaatgaggtcataagggtgaggctctgatccagcaggattagtttccttataagaagagacaccagagagcttgttctctctccacgaggacacactgtggaaaggtaatgtgaggctgcagcgagccaggaagtgagttctcacctaaaatggaatctgtggacaccttgatcttggactttccagcctccagaactgtgaaaaaaatgtctgctgtttaagccatccagtctgtagtattttgttatggcagtccaagatgactaatacaatgaacaacataatttattactagagatatattttagttagtaacttgtcactacattacggtttcaggagcaaacaaaaagtgtgccaagattcaagaagaaaaagtaaccaaaaatcatgccatcagcacctttaatctttaagtattattactatttcttactaaaatggtacagtttgcaaaatccacacaagtaaatgtggtatttagctaccaacttatacatttcacgaagtaactgcaaaatataagcagatagttgttaagtttattatatcaggctgggtgcagtggcttatgcctgtaatcccagcacttagggaggctgaggcgggaggaccacctgaggccaggagttcgagaccagcctggccaacatagtgaaaccccatcactactaaaaatacaaaaaattagccgggtgcggtggtgcgcacccatagtcccagctactcgggaggctgaggcaggagaattgcttgaacccgggaggtggaggttgcagtgagctgagatcatgtcactggactccagcccgggcgacagagtgagagtctgtttaaaaaaaagtttattatatctaaagacagatttttagcccttgaaggcaatgtttaatacattctttttgtacacaaaaataaaggcaatagagaattcataaagtaagatgtgattgaagaattttagaggtgctttgaatccttttttccaatataattttctcattttaaaaacaagaaagaccaaatagtggatgaaaaagttcaaaatagttcctttttcttcgaaaatcaacacatactgactaatgccaattccgtttcatctccagtgtctgatgaatgaaatgaggtttatcctaatataaatatctaaaacaaatctattgctaaaacatctcttggagagttgttataacgtaacttttgttgatagactagttattgcctattgtaccaaaaccatatgatgttagttttataggaaaagaacatgtaagtgaatgttttaaaaccaatgaataatgaagtacttagcccaatccctctccctacccagtgccttgtccaacaggcaaaataacctgtcagtcaccttactttttaaagtggttataaagtcttcctatttatactttactgcttgtacttaattgtgacattttaaaggtacatttagctttaagcttcacttattatgtcattagcaggtcaacgttttcttatgactttttttcctgaagaaaaacacagtttaaagagagctcagggactactgcgttgctactgtgtggtgattgttagtaacacatcaaagggaatagccatattcaaagtggcctcccactcctcttgtcaccagtagctctgcctcccagcctttatgggcccccagactcttctgaatgttgttgtggtttgcttttttgaagccagcaaaactccatcgagctggtatatcatgtgaaataacagcaaaagttacaacagaatccaaatgtcattgcatcaacaaatattatggtattattgtaaaaggagatgagtcaagaaatatatattatatatataaatatatgtatgtgtatatatatgcatgtgtgtgtgtgtatatatatatatatatatatatacacacacacacacacacacacacacagagagagagagagagagagatggagtctcgctctgtcacccaggctggagtgcagtggcgcgatctaggctcactccaacctctgcctcctgggtttaagcatttctctgcctcagcctctcaagtagctgggatcacaggcacgtgccaccacgcccggctaatttttgtatttttagtagagacaaggtttcaccatattggccaggctggtcttgaactcctgacctcgtgatccacctgccttggcctcccaaagtgctgggattacaggcatgagccaccacacccagccgagacaacaaatatgaaacccaaagaatgacacataaagaaaaaagaagataataatcacctagccttttttcttttatgattttattttattctgattctcaaaacattgttacatttaatttgctaaaccttgttaaacagtaggtggctattggataaactttaataggaaatttgagactttattaaatccctttgttactatgaagtcaatgtaagttttatggtattctgggattaactttttgcatcttaaaaatagagacaactatgaaaactgtatctaggtgagtgaacttgatttctcccagtatgcctactgcagtttctacctctaaaaggctacatcatcttgagcaggttgcttgatatctctaaaacccagtttcacattttgtttcaaaagttctactccgtaaatattgttgagaagattaaatgagaccatgcgcatctttaactctgtgcctggtacatgataaaaacccaggaaacattggttcctttcttcttagtaataataaaagaatatttattgaggccgtcagccactacactgagcattctacatgcttcatcacatttaaccttacaacagctccatgaagttggcacttactatccccaacttacaaatgagaagactgaggcctagaaagatggagtcacttgcttaagaatgcatttgagctaagctgtagagctaaggttttaactccaaatcctgccttacccattggctaagtatagccccactggccaatctgctaattcgggggggctcagtccacttattcattgagcaaatattattgggtacatactatgttttaggtactttatgaattgctgaagatgcaatgatgagtaaagcaaacatgactttcatcctcatggaactcacaacctagtccagggtttttcaactttggtgctattgacatttggggctggacaattccttgttatggggactgctgtcctatgcattgtaggatgtttagcagcatctctggtttccacccactagatgttaagagcaagaccttccccaacccaagttgtgacaataaaaaatgtctccagacattgtcaaatgcttcctgaggaaggggtggggggtgtgtgaaatgagaaccactgcttaatattgtgaatacaatattaaacattaagaggtttgtgcctaaaaaattagggaacctctacttagcctggggaagcaagggaaatctagggtctcttgtaaaatacagtgtctttctagaaaagtaaaaataatcatagttgatatggtttggctgtgtccctacccaaatctcatgttgaattgtagctcccataatccccacatgtcatgggagggacctggtgggaggaaactgaatcatgggggtagttacacccatgctgctgttctcgtgatagtgaattctcacgagatctgatggttttataaagcgtttttcccccttttgcttggcacttctcattgctgccaccaggtgaagaaggatgtgtttgcttccctttccactatgattgtaagtttcctcaggcctcccccagctatgctgaactgtgagtcaattaaacctatttcctttataaattaccccatcttgggtatgtctttattagcagcataagaatggactattacaatagtcatataccataatgtagagtctgacatacaaccaccacctcacaaaaagttttcacattattttattgaaaacgttcctgaaactatctctagtttagaaaaggaagccaatcaaattttctcaatagaaatatgttttatagtcaacttatccaaaacagggtgtaccgtgcattactatgttttcaaaagaaaatcaaggattataaagacatagtgactcataattgggtctaactatagcattataattgtgtaggtgaggaaagcatgcaatttgagaaggctagaatcaaggtcttgctaggtttgatatgtccaggtttatcacagtgttttcaggttgatgatgttgttacttctggcaggttaactcttgcgatctaaaatttacacaacaaaaattttatttcttgttcatgcaatagtcccacatggatgatcctggtttttcaggtcttctgagaggcttccctctacacagcaactcatagacctgaacttcaacaatcttatggctctgccttcctttaggtacttggagttcttgccttcaccgcggaaggggaagaaagaatatggggactgcaatggaatttttacagaccatgactagaattctgatattccattggtttaaaactcagtcacatgactaccactaaatgcaagggaggctgaaaaatagaatccaggtgtgtgtctagaagagaagggaggactgtttggtgaacatccagctatactttgccaatatgatcaaaatcactttcattgccaaaaagccataccttatctaattttcagatttataaaatcaggattgataaaatcagaaatattctgtgaggactaatgaaagatatataacttacattcttcccaaagaccttgtgctatgtatgtatctgatacctggagaataatgcactatgctaatttatagctccgttatgaatagacacatttttaatctgtggcagacatgatgtagtcaatctgttatcattcattagagaaaggagaatgtgctttgcggcccagagttcatgtcccccagcactggtgtaatattttcttttgctctcaatgtgtgaattattaaaaataagctagctacaatgtcatcatttttgattatatcaaaaaagaaggcagagacagggctgcttccaatctgtgaagttatttagcatttaatattcccttcgggaaatcaatatgatttgggggagattatttatataccactagtcaagtgtggtttaaataaatgtaccgtgttggtagagccatgtgaatgaatcttcaatgtcaagaccttactattgtataaagagatgttatcataaatcagctaaaaggaaaatggttagtaaaaattatctggtcattttcctgatatagatgactatattaggttctgtttttctggtatttgttcaaatcataaaaatgaatgtctgggcactgtataccacacattaacatttattagttatttaaaatgtatattctatgaaacttattttattttggggaagtgaaatatgggctggtagttcagacaggtatacataattcatgattttttaaccagttaagtaaaaaagaattaactgaatggtaacaaaataactcccactgttaagcagtcagggtgcattctgcataattcaggatacaaatcaattccttccaggcttgatggaagttcagagcagaggaggatggttaccagggcaaaaagaaaaggggaaatgagggggcaaaaagaaaaggggaaatgagggaagtctagggtctctgagctaagccacacattggttagcttctccgtaggccgcttcactggaatcctgactcctattacaggaaacagaaattcctgggagaaacaagacaaaagtgcaactaaagggatggactcttccaaagcaacctcgagggtgtatgcggagtgagagcctgcaagcctcacttgaaacagagggtccacactggctttcgttttctctatttagctggttctcagaaacaaagggtatatcctgctttaaacaactagagcatggaaccagaggaatacattatttggttattaccaaatttacaaagggattccactccttatccagacattcactataaaatgaatatctagtgaattttccctggagccaacaaaaaacattttggcttacaaaaattattttcacatatttaggttgaaccatatggaattgtggatatctgatcatttgtgactagcaaaaatggcagtttcttaaggttaaccttaagatctagctttctaggaacatatcctttgtataaagtaagatgcgtcctgctgagaaactttacaatacatctgatggggagacattttaatggtgtaaaataattcaaagggtattatttcaaggttcaaaaatctccaatgttctgacttccaactctctttggtatgagtgctcaagaagtttttaacctaaaagttgacattgtccaatcattaagtgattgggccaatttgcaacaacagcaataaccaaaaaggtagatcagtcattggcttcaaaaaagaacaagaagttgttagctagttgttagctgatggtatctttccttttccactgttagaaatatcatgtgtgcaatgaactgcatggttgttattatagagttccgggtcttttaatatctgggagagacagaacagcaggcttcaggcgggttaggcgagttttgccctttctggctcatttgtctaagaaagaatttggtgacttgacaagtttctagaagtagatgaatattacttgagtgaatgcagccagaggcagttagcaaattctgaccaccatcatagttgtcacccactgaaattgaaacttgagtccaaatttatacaagtggattcacttacgtggtacagaattcacatgctgtttattaactatcactgggtccttttttctgaaccctgtacatttttggatggcatgatattttggtagttgtaatcctcttgtgacaggttataaaagccagttaaaactttcttgttttgttctaactcagtatacccagctttaattgcaatgacgattttgattcaaaagacaaacttcaggaaaggaagtgaaaaagtcagcaagtctggagaaggttggaagagggagtgtgtgtaggatgtggggagagagaaagacagcagattcttcttcttttttaaaggaattattcacttctaaatgagacagctcattttaactgccccgaatttatgggtctagccattgggggaagattatgtgtctggggttgtctggggaaagaagctacctggcggtccaacattcacggtcaattgttattacaggtgtgggaacttgttgctggcaatgagagaattcctagggcaggaaattcagatgggggttggttcattgatggggtggtcaggaggcagccaaagccctctgccagtaatgggtttaggtagctactggagctagtattttctgctctgtagtttagaaggatgccacaatccaacatttctctatagaaatgcatggcctatttcatgtatccattgactttattttgcccagcagttacactcaaataacaagcaggcaatattttctttatagacaaattggcttatactgggttatagtaattaataagttacatatattacataatcacataatcaataagttacataaattaataagtacatatattatatatatatatatggatggagaaattactttttaaaaaacttgtacctatttgtaatcccaccaaccaaatgagagttattagcttgttttgagagattccagccaggccactcttactttggaggagaccagggcatattccccaaattctttccttctttcctttcttcctttatccctccctcttgctgacaaacattgactgatcacattcaaacactggacacaaagtcttcaatcacattagtcagcatgtgtgggagagtaaaaatatcatatgttctcttattttgtcttcttacataatccatataaatatcatagaaaattccaacatgctgactttcaatccccctttcccagatgcttttcacatctggaagtcacacaaattcttgtgtcagaccatgctcctcaattttgctctggaaatattgtcaccataactgtgggagacagaaaccggccatgtcttttctttagcctgactgccgcactcattaaatggctcttcatcttttctcctcctcaatgatggcactatggtgcctcctcttcacatccccaccccccagcctcaggtttaggcagtgaagagacaagagtgcatggttatgcagtggaaccttttagtacccttcctcccttacttcagactctgtattgtattaatgagctattgtcatggtgctttaagaagccaggatgaacaacagccttcttgtcaaggaaagtgacagtcaattaatgaaggttttctgtattgttttaagtaggaaagcctccaaatagcttttcaattggtgagaggaacttcagagctcaccctcgttccagaatactctgacaagtttcaaattattaatggacctctttcaggcctctgtaaatttgggcttttatagtgtctactaaagccaagcaaactgctccaataattataagttaataaaacacattgaggtgtatatgacatgaaacatgattaaaacactcccagccatattgatcccatatacaataggaacagttcaggaattctggctgtgcctctttcaagtagcccaaagtaaaattacactgtatttcaattgtggttttcatctcctttcatgattttcccctcttagaaaaaaagagaaggagcaaatattaggatcatcaagttgatgaattaaagaatcaagatgcaataggcagtgtataaaggtttgtagtgaccagctgttgaaagtgaagctcaagtgcattatagtggcatgttcttacgaatgtatcttctaatgcttttctatattttagtgacctgtgaatgatttaatgcagtgggtctcaacaaggggttattttttccctgcaaaggacatctggcaatgtctagaacatttttggttaccacaactcagtgggagaagagtgttactggcatccactgggtagaggacagaaatgctgctacacaatatgcaggacagcctcccacactaaagaattaccggccccaattatcgataatgccaaggttgagaaactctgatttatgtacatccaattcagtttgttggattcaaagtccatatttaaataattatttcaagcattatcagcagtgacagttaaaagtaggtagtctgacatgagtagggaaggagagggtcccctttacccccaggaatgtcaggtgaccatcaggtgatggtcaggcagttgttaactgtctctctaaaatgatacctggtcacaactggcagcggggaaagggagcctcccaatagatagaaaacacctgaggctgatgatcagcgcttcctgataagatctcaggagttgggcaagtgggttcaagcatgtacaataagaggcaaaatggtggagtttaatgggtatatgaccttcttttaggaatgcgggactggtaagggaagaacacctcaagtgagcatgtgcacaatttcagcaaactcactgcgtatatggcccctcctaagtgctggcaggtcaccgtgcaagcagacagcccactccaagggaagaatcagaggagaagaaatacaaaccctggaaccaagccaatgtataaaaccccaagtcaagggccaaatggggcacttggatctctcaagtcacccacttggtcctcttccaagtgtactttgcttcctttcattcctgctctaaaatctttaaactttcacttctgctctcaaaatgtggttctctcagcaggagcatcacctgggaaattgttagaaatacagattctggagccccactccagacatacagaatcagaaactctagggtatgttcactatgctttatttattatttcttttctttctttcttttttattttttgagatggagtcttgctctgttgcccaggctggagtgcagtggcgtgatctcggctcaccacaacctctgcctcccaggttcaagcgattctcctgcctcagcctcctgagtagctggggttaaaggcacgtgccaccacacccggctaatttttgtatttttagtagagacggggtttcactatgttagccaggctggtctcgatctcctgaccttgtgatccacccaccttggcctcccaaagtgctgggattacagttgtgagccaccacacccggccagcaatctgtgatttaacaagtcatctaggtgatgctaatgcatgctcaagtttgagaaccacgcccggcctagttcactgtgctttaaatcttccaggtgttgctgataacatgcccaaattcaaaaccactgctttagctgaaaagtggtagagagatagagagggacacagagaaatagagaaggagattttttttttttttttgagacaggatctcgctctctggtccaggttagagtgcagtggcaccatcatgggtcactgcagcctagacctccagtgctcaggcagtcctcccacctcagcctcccaagtagctggaactacaggcatgcactaccatgcccagctaattttttaaaaacatttttgtagaaacagggttttgccatgttgcccaggctggtctcaaactcctgggctcaagcaatcctcccgccttggcatcccaaagtgctgggattacaggcgtgagccactgtgcctgaaagagaatttttaaaggaagttctaggtttgcactactcaacaacaaaccaagacaaccctttaacctcaacaactttaactaaagatataaagtttgggttggagtttcactttgagtctcacagatgtgtagagttcaagcccactagttgagatggtccaaagaggttcagaacttaagtgttgtcatgtagtaagtgccaggccagggagagatggggcaccctctcttgatgaagtactccgggcatgtttactcttttcatgataaagagggctgtagctaattcttcctatcacctccaaatttatctcaatctcaagctttgaagaaatatcatcaggtatgtcagtatttacgtgccctatgacagcgggactgagaacatggaggaaagcaaatgtcctgtttccagttaccactgcagcaccattaaagcacctctgctttaatcatccattcttcgactgtattcagaacacttggaattttacactctggcagaattccctcttacaggctccatagcaagatgcttttcctttgcatgttcaaaaaactattcttaaaagaaaacaaaaatacaattgaaaggtggggagaaagccttctttgtgctggtcatttggaatgcaaacaatcagaaatgttcattagcatgccagcagcccaggcccctgcaagaagcatgctttcctggaggcacagcttagagcgaagcctgggttaaagttgagtgggagagagtattgaggaccctcaatcccaaagggagccctaaatcctgtggctgttgagcctggaaacttatatagctcactgtggcctgtgtgccaaaatcaagaactcctcttctaaaagattcatctttgacagttgctgatcttgtgtagcactagcagagcctctttaaaattcgtgtgagatctacttttgttaatcgaatctggaacattttaatatgctttgcatttcaattgtattagcagtatttcttatttaactgtagctcatgcttactgatagccatggataaaagtaagtcacatgtagcatgccaattgtctcatttgataatactccaaacataacgaaaagagaatgaaaatgaagcaacgtctggtagggcttgaaaatattttatatccaaggagcctgccaaaatgttaacataagggaacaatatcatcagacaaaagaaaaaataactactaaagcaactagtgacaatatgtagaatgccgagctttgtttaaaaaaataaaattctaccactaacatacaacaatttcaaaaagtgtttattgttctaatttcactccaatcaagacataatatttccttttgtatactgtacatattgcagttttttaaagaaataatttaattggcatgcaatagaaagttattctcttcttaaaaatgaagttgggagggtggagccaagatggccaaataggaacagctccagtctacagctcccagcatgagcaacgcagaagacgaatgatttctgcatttccaactgaggtaccaggtgcatctcactggggattgttggacagtgggtgcaggacagtgggtgcagtgcaccgagcctgagctgaagcagggcgaggcatcacctcacccgggaagcgcaaggggttggggaattccctttcctagccaaggaaaggggtgactgatggcacctggaaaatcgggttactcccaccctaatactgtgcttttccaatggtcttagcaaacggcacaccaggagattatatcccatgcctggctcggagggtcctacgcccacggagcctcactcattgctagcacagcagtctgagatcaaactgcaaggtggcagcgaggctgggggaggggcgcctgtcattgctgaggcttgagtaggtaaacaaagcagtcaagaaactcgaactgggtggagcccaccgcagctcaaggaggcctgcttgcctctgtagactccacctctaggggcagggcatagccaaacaaaaggcagtagaaacctctgcagacttaaatgtccctgtctgacagctttgaagagagtagcggttctcccagcgcacagcttgagatctgagaacggacagactgcctcctcaagtgggtccttgacccccaagtagcctaactgggaggcaccccccagtaggggcagactgacacctcacacagccaggtactcctctgagacaaaacttccagaggagcgatcaggcagcaacatttgctgttcaccaatatccactgttctgcagcctctgctgctgatacccaggcaaacaggatctggagtggacctccagcaaactccaacagacctgcagctgagggtcctgtctgttagaaggaaaactaacaaacagaaaggacatccacaccaaaaccccatctgtacgtcaccatcatcaaagaccaaaggtagataaaaccacaaagatggggaaaaaacagagcagaaaaactgaaaaatctaaaaatcaagcacctctcctcctacaaaggaatgcggctcctcaccagcaatggaacaaagctgcatggagaatgattttgacgagttgagagaagaaggcttcagacgatcagactactccgacctaaaggaggaagttcgaacccatggcaaaaaagttaaaaaccttgaaaaaagattagacgaatggctgactagaataaccaatgcagagaagtccttaaaggacctgatggagctgaaaaccacggcatgagatctacgtgatgaatgcacaagcctcagcagctgatttgatcaactggaagaaagggtatcagtgatggaagatcaaatgaatgaaatgaagtgagaagagaagtttagagaaaaaagaataaaaagaaatgaacaaagcctccaagaaacatgggactatgtgaaaagaccaaatctacatctgattggtgtacctgaaagtgacggggagaatggaaccaagttggaaaacactctgcaggatattatccaggagaacttccccaatctagcaaggcaggccaacattcaaattcaggaaatacagagaatgccacaaagatactcctcgagaagagcaactccaagacacataattgtcagattcaccaaagttgaaatgaaggaaaaaacgttaagggcagccagagagaaaggtcgggttacccacaaagggaagcccatcaaactaacagctgatctctcggcagaaactctacaagccagaagagtgtgggggccaatattcaacattcttaaagaaaagaattttcaacccagaatttcatatccagccaaactaagcttcacaagtgaaggagaaataaaaccctttacagacaagcaaatgctgagagattttgtcaccaccaggcctgccctaaaagagctcctgaaggaagcactaaacatggaaaggaaaaaccggtaccagccactgcaaaaacatgccaaattgtaaagaccatcaaggctaggaagaaactgcatcaactaacgagcaaaataaccagctaatatcattatgacaggatcaaattcacacataacaatattaaccttaaatgtaaatgggctaaatgccccaattaaaagacacagactggcaaattcgataaagagtcaagactcatcagtgtgctgcattcaggagacccatctcacgtgcagagatacacataggctcaaaataaagggatggaggaagatctaccaagcaaatggaaaaaaaaaaaaaggcaggggttgcaatcctagtctctgataaaacagactttaaaccaacaaagatcaaaagagacaaagaaggccattacataatggtaaagggatcaattcaacaagcagagctaactatcctaaatatatatgcacccaatacaggagcacccagattcataaagcaagtccttagagacctacaaagagacttagactcccacacaataataatgggagactttaacaccccactgtcaacattagacagaccaacgagacagaaagttaacaaggatatccaggaactgaactcagctctgcaccaagcggacctaatagacatctacagaactctccaccccaaatcaacagaatatacattttttttggcaccacaccacacctattccaaaattgaccacatacttggaagtaaagctctcctcagcaaatgtaaaagaacagaaattataacaaactatctctcagaccacagtgcaatcaaactagaactcaggattaagaaactcactcaaaaccgctcaactaaatggaaactgaacaacctgctcctgaatgactactgggtacataatgaaataaaggcagaaataaagatgttctttggaaaaaatgagaacaaagacacaacataccagaatctctgggacacattcaaagcagtgtgtagagggaaatttatagcactaaatgcccacaagagaaagcaggaaagatctaaaattgacaccctaacatcacaattaaatgaactagaaaagcaagagcaaacacattcaaaagctagcagaaggcaagaaataactaagatcagagcagaacagaaagaaatggagacacaaaaagcccttcaaaaaatcaatgaagccaggagctggttttttgaaaagatcaacaaaattgatagactcctagcacgactaataaagaagaaaagagagaagaatcaaatagacacaattaaaaatgataaaggggatatcaccactgatcccacagaaatacaaactaccatcagagaatactacaaacacctctatgcaaataaactagaaaatccggaagaaatggataaattccttgacacatacactctcccaagactaaaccaggaagaagttgaatctctgaatagaccaataacaggatctgaaattgaggcaataattaatagcttaccaaccaaaaaaagtccaggaacagatggattcacagccgaattctaccagaggtacaaggaggagctagtaccattccttttgaaacgattccaatcaatagaaaaagagggaatcctccctaactcattttatgaggccagcatcatcctgataccaaagcatggcagagacacaacaaaaaaagagaattttagaccaatatacctgatgaacatcgatgcaaaaatcctcaataaaatactggcaaaccgaatccagcagcacatcaaaaagcttatccactatgatcaagtgggcttcatccctgggatgcaaggcaggttcaacatacgcaaatcaataaatgtaatccagcatataaacagaaccaaagaaaaaaccacatgattatctcaatagatgcagaaaaggcctttgacaaaattcaacaacccttcatgctaaaaactctcaataaattaggtattgatgggacgtatctcaaaataataagagctatttatgacaaagccacagccaatatcatactgaatgggcaaaaactggaagcattccctctgaaaactggcacaagacagggatgccctctctcaccactcctattcaacatagtgttggaagttctggccagggcaatcaggcaggagaaggaaataaagggtattcaattaggaaaagaggaagtcaaattgtccctgtttgcagatgacatgattgtgtatctagaaaaccccatcgtctcagcccaaaatctccttaagctgataagcaacttcagcaaagtctcaggatacaaaatcaatgtgcaaaaaccacaagcattcttatacaccaataacagacaaacagagagccaaatcatgagtgaactcccattcacaattgcttcaaagagaataaaaaacctaggaatccaacttacaagggatgtgaaggacctcttcaaggagaactacaaaccactgctcaatgaaataaaagaggatacaaacaaatggaagaacattccatgctcatgggtaggaagaatcaatatcatgaaaatggtcatactgcccaaggtaatttatagattcaatgccatccccatcaagctaccaatgactttcttcacagaattggaaaaaattactttaaagttcatatggaaccaaaaaagagcccgcatcaccaagtcaatcctaagccaaaagaacaaagctggaggcatcatgctacctgacttcaaactatactacaaggctacagtaaccaaaacagcatgatactggtaccaaaacagagatacagaccaatggaacagaacagggccctcagaaataatgctgcatatctacaactatctcatctttgacaaacctgacaaaaacaagaaatggggaaaggattccctatttaataaatggtgctgggaaaactggctagtcatatgtagaaagctgaaactgcatcccttccttacaccttatactaaaattaattcaagatggattaaagatttaaatgttagacctaacaccataaaaaccctagaagaaaacctaggcaataccattcaggacataggcatgggcaaggacttcatgtctacaacaccaaaagcaatggcaacaaaagcgaaaattgacaaatgggatccaattaaactaaagagcttctgcacagcaaaagaaattaccatcagagtgaacaggcaacctacagaatgggagaaaatttttgcaacctactcatctgacaaagggctaatatccagaatctacaatgaactcaaacaaatttacaagaaaaaaacaaagaaccccatcaaaaagtgggcaaagaatatgaacagacacttctcaaagaagacatttatgcagccaaaagacacatgaaaaaatgctcatcatcactggccatcagagaaatgcaaatcaaaaccacaatgagataccatctcacactagttagaatggcgatcattcaaaagtcaggaaacaacaggtgctggagaggatgtggagaaatagaaacacttttacactgttggtgggactgtaaactagctcaaccattgtggaagtcagtgtggcgattcctcagggagctagaactagaagtaccatttgacccagccatcccattactgggtatatacctaaaggattataaatcatgctgttataaagacacatgcacacgtatgtttattgcggcactattcacaatagcaaagacttggaaccaacccaaatgtccaacaatgatagactggattaagaaaatgtggcacatatacaccatggaatactatgcagccataaaaaatgatgagttcatgtcctttgtagggacatggatgaagctggaaaccatcattctcagcaaactatcgcaaggacaaaaaaccgaacaccgcatgttctcactcataggtgggaattgaacaatgagaacacatggacacaggaaggggaacatcacacaccagggcctgttgtggggtggggggaggcgggagggatagcattaggagatatacctaatgttaaatgacgagttaatgggtgcagcacgccaacatggcacatgtatacatatgtaacaaacctgcccgtggtgcatatgtaccctaaaacttaaagtataataaaaaaaagaaaaataaataaagaaaaatgaagttgggtgttaaggggttttcttgtgttaaacagaatattttccatacatatgtgtgtatgtgaatagatatatttctctgtatgtaatcagaactagaggtcaactttctctagtgtgaattaaagagtaattaatacaatactgtatcctttgggtcctttggattccaaaggaccaaagaagctgaggaataacagatttaagaggtttggatgttgcaaactcagataaattcatataaagtgtaattttgtgggtttctcacttatcagatctaaagacacagcattctttgctaatgtttcagtaacattcaactatcaataagtattttctatggtcattctgtgccgaaaacacagaatcaaatttctcccacctacagtacaatctggaatgtgaggattgtgggggcaaaaaacttccttaacaaatgatgctagcaaaaaccaataattgttttctcgggcaaaagggatttaaatctaaaaaaaaaaaaaaaactttctgaaaattaaagctaaatcattagttttgcactcaataaagaatacagccaagcatggtggcttgtgcctataatcccagatatttgagaggctgaggtgggaagatcgcttgaggccaggagtttaagaccaggctgggcaacatagcaagattactgtcactacaaaaagagaagaaaagaaagaagaagacgaccttcttctgcagggtacaggcttgctttttgggagattatgtgtagaaatatttccaaactgccaccaacatagttctttggccatctccttatatctctgaatgaatgtgtgattagaaaaagcatttttatgttatcctatgctaagtataattttaaaagcaagcatatggctgcaaaaaaaaaaatcacttaatagatgatgctacttatccagaggttgggagacaggagacataaatttctctaaagcttcttctagttctaacattttctttttctgtgtaaaacaatctcccccactaccttattctactggtgtgcatgttgatattataaagacacggcaaattattgaaatttgagtctcaaaaatgcatctaaggatatgagatgtgcctggatatttagcaatgctggctacttacttgttataaatcatctagagatattacaactttaaatagtccccaagggcaaaaatggccattccagtgggggaaagcaaaaatctaagacaaataggaattagtcaatcgtttctccccaaccaaaccagtgatgaaagctacaaaaaataccttccctggttgagaaacatcccgtcatttaaattgctgggttaatgaatatcggccttcaagaggaaaattgaaatgtattttatcacagactagtttatggatgtgtgtgtttatgatatcagcagaaatttctgagatgactgaagaactagctcaggaaatggccaagaacaaagggagacgaggccatcagaaacccaagccaaatcatgtcctgaaatttaagtttccgggcagaatcctctcttgcaattgctgacattgggagccccggtcggaactgcagaagctgctgcctctagaaagtttaagtatctttttcttgctaggtttgttattattactattttttcttatcagagaggttgtgtctcatggttgagaatttaaagaacctctttgctgaagttatgggtacgtccagtaccgatggaggtataatggtgccctctgctgggaagagtcagtaatgctacccagtgagttttctactgggcctgaagtaattttaggtgctggtggagggatgtcaagggtgtttctggaacaaaaagttccgagaagtactctgcaaaaaagtagttacaaaaccccaaaccacatgaaattagcttgattctgagttgacagtggaatctgaaaccagctgtatttcatcctaaaatgttagcgctataaacccttcatcaaacctggagacaattattttctcactatctggacaagaccacatttccagcggctgaatttttccagggccgactttgccttcccattttccttttgtagagctcccctcttgcagacttgcataaacaagcctcactcaagaatgaaagatgctatgaggctgagcccccatatgacattctgtaattttgctattaagaatcataaaaggaatttgtcacaaaaagtacacaccacactgacatgccttggctccttagaaatgcatagtaaggccaaatatcgatttttaaaatgtcatttcaggaagttcaggaaaactgcactatttcactaaaggtgtagtttcttatttttgagacggagtctcgctctgccgcccaggctggagtgcagtggcgcgatctccgctcactgcaagctccgcctcccgggttcacgccattctcctgcctcagcctccggagtagctgggactacaggcgcccgccaccgcgcccggctaatttttttgtatttttagtagagacgtggtttcaccgtggtctcgatctcctgacctcgtgatccgcctgcctcgacctcccaaagtgctgggattacaggcgtgagccaccgcgcccagctaaagatgtagtttcttacttcatttaccagttctggatccgcagccgaaatatttaaaccatctgtaacttaaagtagctaaaaaataactaaagggcagtaaaaggagactgtagccatgtattgcatgctaattgcacttctagtcaaaagcatactgttggctggaccatcttcagtggcatcttactctgtaagatattagggaaacatctgtttattgttattcatttattttgttgagacagggtctctctctgttgcccaggctggagtgcagtggtattatctcggctcactgcagcctcaacctaccgggttcaagcatcagccacctcagcttcccgagtagctggggctataggcacgcaccaccacacccggtaattttttgtattttgtagagacgggatttcaccttgttgcccaggctggtctcaaactcctgggctcaaatgatctatctgcctcagcctcccaaagtgttggaattatgggtgtgagccattgggcctcagcatgttgtttttgagtgttgtcagagtaagatgctgggttttccagggaagccagtgatgtctatctaaagtatgatgttcatcttgaaggagcttataatctaagaaaggagagaagacatgtatgggaatgatgagaattgattatagcatatgcagctgactatagtaattcaataaaagagacctggattctctgtagtttagaggatgagggcaagatctttcccaaccggaaaaaactctaaatgcctcttggatggggtgtcacttgagctgggactttcaagtagatttttaagtacttatttctctttggaaaaatagaaagataaataaaataaatagatgagcttttcctttttgccatctggcccaccttgtggttttactgttttatcttagttaccttggttgattttgaggttttaatcataggattccaatgctcttttactcaacatggagaaaaccatttgtttggggattgatttgtacaatgtattctgcaatactttagattctaaagaatgagggcgaatttttaaaaattggggacaggttcaatttgtgtgtctctctgcaaacctcgttcaagatgtcagatgaaacctgtgggggtattagctttctaaaggtgttgttccattatgctctagccttatagttattagttcagaacaatgggtctgaactccaaaactgtagcactgcacatttccctgcaaagagggacaattatgtcattggaatacagaagaaaacagcacttttttctcctcccaggaatgatgtcactgtgacactaagagtagcaaattcctatctagaaatccaactgtgttcacttcagagcactaaagaagctcagtgaataaaatcaggtgccagtcaaaagctatacttctttgtaccgctaggtgaagattgcatctctcaatttccccaagggctttcccagtaaacactccccttaaaagattcggttttgatgaaagaaaagagaacacaatagtattctctaagatatgatttaaaaattataaatatatttttcccgagggaaaaaactgcatgtaaccattttttaaattgacttttaaaagatattggccatgttacatattctatattaaaagattagtaaattaaaaaaaatctgtgtacattactgaacataaccacaatacatacttagggtcaatatgcttagaaaaaaggcctggtacggtggctcacgcctgtaatcccagcactttaggaggccaaagcaggtggatcacttgaggttaggagtttgagaccagcctggccaacatggtgaaaccccgtctctactgaaaatacaaaaatttgttgggcgtggtggggtgcacctgtaatcccagctacttgggaggctgaggcaggagaatcacttgaatccgggaggcagaggttgcagtgagctgagattgtgccactgcactagagcctaggcaacagagtcagattctgtcttaaaaagaagaaagaaagaaaaagaagaacttggtgcacaaaagaaataatacagacaataaacttggctgagtacccaaataagttttctttccttcactgtctcatagttactcttaagatgttctatatttcttgacctaagcctcctcaattctaatggaacaaggtagaagtttttttcttttaaaagccactatgtattttaagcgtctgatggtaggtaaggctgtgtaaataagacatatagtaaattatacgttctgagatttttcttttagccttattttatctaagccagatttctcactggatatttacatcagacccagtaagtagacacactctggatatcaactaagcaggatttgtcattctttacaaattgataaatttggcacactctgtatgatataattaacaacaatttcttttattattttcagaagctaaacatctaattctctgtgagggcaaagcagtaaacatttaatctaaattatttacatgtgctttgtgagaaaatcaaaataaaaaaagaggcatttctgacggtacaggttttatgactcaggttaagataaaaggttggggattttaggtattcagtctgtagcataaaatttagttgagtgtttctttctctgaggaaaaaaaaaaacagaataagagatacatctgactaaaaattatagccagtcctggttgaatgaaactactgtctggcagaatttatgagagcaaaataaaattgtatgagtgacaattggctttagaaaaggatggcataacagaaccaagtccaagaacagcagggtttacctttgccctcatttcccatcttaagaactgtggtggtatcacatgtttccaacttgagcgtcctggtccttgtaaccactatacttcagcattctggcaactcgctgacccacatttttggtggccaaactgtggttagtgtgggccaaggagccatgaactgctgactaaactctttctgaagcttgtggctacacaggaatcagtgggcaaagattgcattcctcttttctgcctgtggcgtatgacaaagtgggactgggaagggctacagctagcaaatattccaagactactttcttgattcagatggaatgctctgaagagctgaagcaaagaacaaagtcttcagtcaaatctccatttatgtaatgtctctgttatatggcagaatgaagacccatgctgtttctatctcatcatgatttttatttttttatttttatttttttgagacggagtttcactcttgttgcccaggctggagtgcaatggcacaatctcagctcactacaacctcctcctcctgggttcaagtgattctcttgcctcagcctcccaagtagctgggaccacaggtgcctgccaccatgcccggctaatttttgtattttctttcagtagagatggagtttcaccatgttggccaggctggtgtcaaactcctgacctcaggtgatcctcccgcctcagcctcccaaagtgctgggatgacaggcgtgagccactgtgcccagcctcatcattatgatttttaaattcttccctttgaattataaaggattagtccatcagagctatgtatagatgcaaattaaatgaaacatttgtcttaactctgctaaattagagggaacttcgcaattttttttcaagacttgagagaatcatcattctaatatccaaagcagtgattctcaaagtgtggtccctgaaccagcagtagcagcaggaagggagggagagagagcaaggatgcatagaaatgcagattcccagactctaactgacttctactgaatctgagctctgaggccagcaacctgcattttaataagccttccatgggatgctcttgaatgctcaatttgagaaccactgatctaaagaacccttgcaggggtgacttctgtgagaataagcagtgctggcctttcctgggaaatgtgcagcttgctatgtgttatcagggacacttcaactttgtattttgcccatgaaatcgtaacactctagtttagatgaagaaaataagtgatctgccacctcaaattctattagttgacttgttcaaacttgaattccgaaatattttcttaaaaccccaaagcacaaaatgtaatttgtattattgagtggttctttggaccatcttctgcacatggtaactggtttctgtgtaagtgaagtgtttctgtgtaagtgaagtgtttattgtctcctagaaataaatatttcataggcttaaagaattttagaggtggatggatctttaaaactcatcaacttttccccccccaggaaaaaacgtaggctgcaatatggcacctacaagagtttaggcagaaagatcttcctgagttccatgggagtgggtggccagctgctgagctgtgactttctctgttggaatctgaaagcaggagctcatcttcatctcttccccctccttccacatcacacttcttggaacagtgttgacacagttcaataaacgtttattgttaaataatacgaaatcaaatgtgtgctccttttcccccgctcctgcaggagggaaaaaggcattttgttccagtctgccagagggatgagtgagaatgaaaaataatgtttgcttctattatattaataggctacttttttaaaactactaagctagtagcctgtgatcctataaaatggcttccattaacaagaggagcaggacaacaaatggaaattatcaggaatgagatccgttggaaaggctatttggagatgtttgtgcagcacatgctcattactatgtctggcccaagtcaattttatttagcaccataaaaacagagttagcttatgatattttaagcatcttaaacaaagcaagatttatgctattgggtgtgactttgggccttcccctctacccggttttccacaggtctggaaaggcaagaaactgtttctttatgcattgcgagtataaagtaggaagcccccgccttctcccttctaatatcaccagcaatgaataggcagcgtgtttcccataattcagcaataactgggctattattctttaatgcttcagtttattaatgtaaccactgtgtcattcctaccatgcccgtgtaattaaattacccgacagacatttgataggaacttctcaatccccacaaaagcccagaatttctatacccctttgtgagtccctaatgaatgggtggcacagacacttctgtcatccgtgctcactcactgtcctttcctgactgctctcctgtgtcacaggggcttgctcctgcagacaaactgggagccgttctaaaggagagggtcacatttccaacacagctaatgtaaggcatgctatcaccttcctctctctttgtcctgctaaagcagaggctgaccaaattaaattccaaaaccgtgtctgccacggtaaatccacggtgcattcttaaaccttggctaccgaatgctaatccttacttaagtcatgattctaaagggaaaatacactgaaaatttgctcaaaaattaaagcaatcacatgcctatccaaatatatcattctatgactttctgaaaaggaaaaaaaatacacttacaaattaaacgtttcatcctttaattttataaatgaagctataataatgaagcctcatccagatggtactcgaatccatcttggaaaaaggcttctgtgattatttataaaataatggacttttctaaaccactcaactggtcattttaaaatgctaatttcaaagcagtactctctattaatgttatagaacttagacatgaactcattaaaataatcaaaatagattttagagtaggacttctttcatttctagaaatggtactttagagactctagatgtttctaaagatttaaaaattcttggccgggggcggtggctcacgcctgtaatcccagcactttgggaggctgaggcgggcggatcacaaggtcaggagatcgaaaccatcctggttaacatggtgaaaccccgtctctactaaaaatacaaaaaattagccgggcgtggtggcgggcacctgtagtcccagctactctggaggctgaggcgagagaatggcgtgaacctggtaggcggaggttgcagtgagccgagatagtgccactgcactccagcctgggcaacagagcgagactccatctcaaaaaaaaaaaaataaataaatgaataaataaataaataaataaaattcttatattttacagttaacacaatacaatacaattaacctagtagatgtatttgttatgtagagtatagatttgaatacaaatctggatgcccaatttttgaatatttaaattacttgatctgtatatgacaagaagaatatgaggatatgtaagtgtatcgaaataaaaatcaagatctaattttaaaagctatttgcttttataagaaaaaagcatcaaatcaaagtatgtgatgcccagatcaagaagattgaaaatgcttctgacaaactaacattgtatttttaaaatttgtataaatttaagaggtacaagtttagttttggatatattgtgtagtggtgaagtctgggctttcagtgtaactatcactcaaatagtatcccatcactcaaatcgtaccgcaactaacctttcagatcagatacatctttttttttttttttttttttttctgagacggagtctcgctctgttgcccaggctggagtgcagtggcacgatctcggctcactgcaagctccgcctcccgtgttcacgccattctcctgcctcagcctcccgagtagctgggactacaggcgcccgccaccacgcccggctaattttttgtattttttttagtatagaaggggtttcaccgtattagccaggatggtctcgatctcctgacctcatgatccgcccacgtcggcctcccaaagtgctgggattacaggcgtgagccactgcgcccggcaagatcagatacttttgagaagaaatcacatcttattggaaattagataatttaaatctgactaaaatcagaataacaatttataattattactatcccttaatatggaaatttgtgttatctatatatgattaaaataactttaatgtatataatgtctcaagctcacagcagcacagaaaaaataattgagtttaaatcttgaaaatatttgagatgaaaagaatatttgtaattatttgtgactgtctgttattctcccaagaaagcaataaaggggtaaaaatcatctaaaacagaggggacacatggaaaacaaattgccaagcagtaggtctaatcctaagaatgccaacaattacattaaatataaagaaactaagcactccagtgaaaaggcagagagtgtcagactggataaaaagcaaagcgaaacaaaataaagcctaattttgcactgtgtacaagagatggacttaaagtataaagataaaaataggttaaataaacgaagatagaaaaaggtatatcatgcaaatacccagcatgagaaaattagcaggctgtattaatgtcaagtaaggtagtcaatgaatatcggcagaaacaaatcacaagggaaattagaaaatactttgaactgaatgaaaaagaaagctcagtatatcaaaatttgtgagatgtagcttaaagcacttcttagagggaaatttatagagttaaatgattataaaagaagcaaagtttaaaatcaatgatctaagtttacaccttaggtagctaatttaaaaagactaaattagggctgggggcggtggctcatgcctgtaatcctagcactttgggaggcccgaagcaggcagatcacctgaggtcaggagttcacaaccagcctggccaacatggcgaaaacaccgtctctattaaaaatacaaaaattagctgggcttggtggcgcatgcctgtaatcccagctactcaagaggctgaggcaggagaatcgcttgaatccgggaggtggaggttgcagtgagccgagatagtgccactgcactctgcactctgtcctgggcgacagagcaagaatctatcacaaaaaaaaaaaaaaaaaaaaaaaaaaaattcaacatacactcaatgatataaaactctctgtaaattaggaattgaaggcaattttaacaacctagtaaaggacatctatggaaaacctacagctcacatcatactttattatgagatattgaatactttcttccaaggtcaggaacaaggcaagaatgtctgctctaaccactgctgttcaacattatataccatagtcagtgcaataaagcaagaaaaataagtgacaaataaaaagacttaaaaggaaataagcttaacctttttaaaaacaattatgtaattgtttatatgaaaaattctaaggcatctactaaataattacactattaatgacattttaacacatcagcatgcaagattaatataaaaatcatttgtatttctatattattgtagcagcatgaaatactggataatttatttaactaaagatatgcaaaatgtagattgaaaaccataaaatattgctgagagatattttaaaaggtagaaataaatggaggcatataccatgattagggattataaaattcaacattgctaaaatgtcaattctcccctaattgatctatagagtcaatacaacttcaattaaaagctttacaagttgttttgtagaaactgacaagttgattccaacatttatgtgaaaatgcaaaagaattagaacagccaaacaatccttaacagaataacaaagttaaagaacccatcctactctatttaaaaactaactataacatgacagtagctgacatcatttatttttggcttaaggacagattgagaccaaggaaacaaaatagagtccagaaatacattttcacatacatggtaagttgattttcttcttcttcttcttctttttttttttttttttttgagagggagtctcgcttatcgcccaggctggagttcagtggcgcgatctccgctcactgcaacctccacctcccgggttcatgccattctcctgtctcagcctcccgagtagctgggactacaggcgcctgccactgcgcccggctattttttgtatttttagtagagacggggtttcaccgtgttagccaggatggtctcgatctcctgacctcatgatctgcccgcctcagcctcccaaagtgctgggattacaggcgtgagccaccgcgcccggccggtaagttgattttcaataaagaggccaaggtaactaaatggggaaaagaatcatcatttcaataaatggtgctagaataactagataatcatttgagtaaaaaatgaaccctcacctctacctcacactacacacagtcattaatttgagatagatcataaacctaaacttaaaagcaaaagctagaaaacttctagaaaaaatcagaggcaaacatctcacaaccatagggcaggaaaattttttttagagagggtgcaaaatgtaataaacataaaagaaaaaataaaaattgtatttattataaattcaaaagttgtgcttatcaaaatacacttgaaaaatgaaaaggcaagctatacattgaaaagaatattgggaagactatcatacacacacagacatatacacacatatatctgacacagggcttggatatagaatatataaagtacccttaaaattcaataattaaaagacaactcaataaaaacgagcaaacatgtgaacagaaacttcttaatggaaggcatatgaattaccaataagcacagggaaatgtaaattaaaaccacagaaagtaccatttcatattcactggaatagcaaaaattaaaaagactgttatcaccaaatgttggtgaggatgtggagcaaccaaaataagttgcatacattgctggtgagagtgtaaaatggtacaagcagattggaaattggttttgtagtttctgctgtattcaaatgcatacctatgctgtgatctagaaattccactcctaagtatttacctaaatgaagtaaaagtatatgtcctcacgaagatttgtatacaaatgtgtagagtagctttattcataacagtcccaaactgtatagtgcccaaatgtccatcaaaaggtgaatgtaaaagacatgtgcacgcaaatgttctttgcagcactattcacaatagcaaagacatggaattattttaaatccccatcaatggtagattggacaaagaaaatgtggtacatacacaccatggaatactatgcaggtataaaaaagaatgagatcatgtattttgcgggaacatggatggagctgtaggctattattcttagcaaactaacgcaggaacagaaaaccaaatatcacatgttctctcttataagtgggagctaaatgatgagaactcatgaacataaagaaggaaacaacagatactggggtccacttgagggggaagggtgggaagagggagaggagcagaaaagaaaactattgggtattgggcttaattaatacctgggtgatgaaataatatgtacaacaaccccccatgacacgtgtttacctatgtaacaaaccttcacatatacccctgaatctaaaataaaagttaaaaaaaaaaaaaggtgaatggctaaaccagttgtggtagtttcatataacagaatactattgcgccataaaaaggaggaaacaacaggttcaggcaacaacataggtgaatctgaaaatatcacaccaagccaaagatgccagacacaaagagtagataggtatgagtccatgtctatggtggtgaaagtgagaaggaagggacacaaagaaagttttctggggttataacaatgtcctagtggttggggctgtcggtacatgggcatatgcattctttaaaactcataaaattgtgcacttaggatctgtgcatttcatcttatgtcaattttccctcaatatgttttggtgattcctagactgttcttctgagctcaggagtggctttggctgcatctttctcatagtgatgaattgtcagtcactgcctggctttttgaaattcaacagagcaagctcaggagtcaattgctaacaaaactgacttcccttcggtatctcttccctcctattttctaccaagagtcgattagacataatagggatttttatttttttattttttgagatggagtttcactcttgttgcccaggctggagtgcaatggcgcaatctcggctcactgcaacctccacctctcgggttcaagcaattttcctgcctcagcctcctgagtagttgggattataggcatgcgccactatgtccagctaattttgtatttttagtaaagatggggtttctccatgttggccaggccggtctcaaactcccaacctcaggtgatccgtctgcctcagcctcccaaagtgctgggattacaggcgtgagccaccgtgcctggcctatagggatttttaaacacactacacagtaaggtagtagcctttaacccaacgtagtttctctctttcttaatttgttcttgttgtttgtgtcatatgccttttttcttacactaaaagaaaatcttttatctgttgtctctaaacaaggttagggaatttttgttgaattttatgtataagtgagtatcaagttgaagttttgtttaaatttcttatccttcgaacttcaaaatattctgcctttaaaaacaaagaatccttgcatatacttctatatatgtatttttatttatttatttattttgagacagggtcttgctctgtcatccaggctggggtgcaatggtatgatcatgactcactgcagcctcagcctcctaggctcaagtgatcctcccctctcagcctcctgagtagctgggactacaggcatgtgccaccacatcctggttaagtttctaaaatattttcccctgcctcggtctcccaaagtgctgggattacaggcattagccactgcaccagcctatatagttatttataattttgaaggtacattgtcagagtgtgttaacttctgacattttcctagcctctaccatggagtaatattgtatattaattcaaatcagttgtcaaagagttagttatgatatctttaatctaaaattgttatatttttttcctgccttagcctccccagtagctgggactaccggcgcctgccaccacgcccggctaattttttgtattttttagtagagacggggtttcaccgtgttagccaggatggtctcaatctcctgacctcgtgatccgcccgcctcggcctcccaaagtgctcggattacaggagtgagtaaaattgttatctttaactactattctcacactgagtttgaaatctgagggttttgggggagtggatgggaggggttgtttttgaagcaacacttcacagttatctctattattgagattttctttgcaaagagcaaataaacattttctccaggatgttcatatgccatatttttttgttgttgttcaatactgcagctcccctgcctcaaagagactcaaacatgtggctgtttatacttgtctgggtctgatgatgaggggagtgttattttcaaggtcactaggctgtcttcagcccttggatacatggcaggcattggaagagacatgttgacatgtagacttagtccattaatgacaagaacttacaaacttctagattgtgagttttcttgcttgtgctaggcctaccttcatttccttatactaactaaaggattctttgagctatggcttattgcctttttcacctatttgtgagagctacttttaatgaaagtgcttaaatctaacttaacctaaaccaagaggtggcacagtatctttaaataaaatcagaaatgctcaaattcctcattttttatccctaaccatggttcatgataatgtcctaaaccttctctttatataattagatatttatatacaaccataggcttttgaggatttgtatgtgtatgtgcacaatatagattcacacatgtatagtttatatatataagatatatttttgtggaagtacatttatagagttattgtatttacattgtgtgtgtgtgtattctcacacaaatacatacgcacattcttataaaaactctctgtattttctctcaaggtttgggaaatagtcttagaatattgcttttcattctcaatcaagaagttagaaagagctaatgaaaaccttactttgaccccttcaaaaatatgcttaggaacaaacataagctccaaggatgagagtgatttgacaaattttctcaattcttgcaaaattgatttctgcagaaccaagcctatgcatcaaatatatacaccaggtccctgaaaaacaaggcactattatgctcaagggatgctagcaaagactcagtactttgtatcctcaaatctccttccctttggatggatcttgctgccccagttgccatgtttgattcatagatttgggccaaccccatgctgaaacatgccggccgcggccaatgccagagcctggaagagcaaatatcacagaaggtccatgtcacagtttcagaaatggcacctccgtagtattcactacataggatgcaaaatgggaatgcatgagacaggtgggaaagagagggagaaagaagaaagtgaaagggggtggggggagaggacaaagaaagaaagcagaggagagaaggaaagagaagagagaagaagggggatagagtggaaggaagggtgtcagagaggagggaggaaagtgaaggctggagaagaaaaaggagggaaagggttggcaaaaagatgggagaagagggatgcaagaaagcagaagtagaaagggaccagagagacagaaataaaattaagagagggatgaggagacaagaatactcttaaagaagaggaagatggaaaaagaggaagagaggtgccgaatgacagagaccaaggggggatagaaaagatgagaaagaaggaggctgtgcacatctgtgtggaccctgctagcagcttagccagtggcccagagcagcctcccagagcagcattggcatggccagtactgtgaggttgggtacccctgtcatcagtcccgggggctggtcctctcgagaaatgcaaatctcagagggccaggctcagacagttagcggtcatccccctaatcacctggctgcctttctgatctctgcacaagggccctcttgcaccgttaatgaattgtaaaaaacattatgttttccttcttctgttagggctcaggtttccagaagaaggaacaaacacataacaggaaatgctccagtaaagccagggagggcatgggtggaaagtagaggttgtaatcctaaagcagagccacccacagcagttctcattgcctttcctaaggtcacagtcacaccatctccttttggtaaacagaaggaggtcccacccaggaaggagtaagacccagtcatgaaaaacaaatgacaacagctctgagatcaggactcttcgtctggggtcttttttctctaggcagcctgtgggcatttcaactagaattatcaggtttagcaaatacacatacagatgcccacttcaatttgaattttagataaatcatgaataaagttttagtagaagaaatactgttttaggataagtatatcccatgcaaagagaggaagggagaaactctaaaaagagggggtaaaataagaagggggaggagaaacagagtggcagagacaaacaaatgcaatctctgggacatactgatactacagttatttgtttacctgaaacacaaattgaagttggtgtcctatattttatctggcagacatagtttcaggtctgtttttccccctaagttatttttctaacttatttttactaatttcattatttcatccaccctttttctatctattggttaatggtggatactaggatttcatcctcacagcatagcaattttctactaaaggcaaaaaaaaaaaaaagaaagaaagaaagaaagaaaaaaccctaaactctcatcctgtgtaccaaggtttattttgttttattttgctttcatactagcaccttccttgattcaagcgatattttgttaggaggaaaagtaaaacatttgcttctttgaataacagaaaacctggtgtgtgttgagaagcgggtcaattggttgaataaatttgttgagtgaagatccagagagcaaaaagaagattggggaagggcagttggggagatgagatggcacaattagatatgctgttcctgtgtgtgtcctgtgtgtgggtggcatggatcccctgtatctgaaagcatttgaaaggagctatatcactgccttccttgaggaatggtaagtaagaagtgagaacaaattatctctaagatcccatctaacttaaacctttttctggtattgatttttaaaataggcctatgtgtattaagagccttttctctagtccagtggaaaaattctatcatagagcttcatcattttgtagaatgtctcctatctgctctcagaaggaattagcacaagaaatttgggaatgaaagaaaatgattaagctaaaattttatactttccagcaaatattctcatagaatatcagggaactatctgggctttggaatgattcaatcatctcttggtgaagtgccaatgggttgggtggaatgtggaggttacaataggataaaattatggaaatgtatcaatggaagagtgaaaatgtaaagtgatgaagattttaaaaataactgggaaaagagtgtcctgacaccatggagaaacagaaaaccaattcgaattgaatggggcattgtttaaggtgaagtgtaatgtgtgctgtcccccttctccaaaatgtagactctcttttgtgagcatgtagccacaacattttagaactcagaaaagaattagccagaggctaggccttggagaatgggctgcatctgttttgaatactttcaatgccccaagcgtaggcattgacctcctgtcagacagggctccaaactgcaacccaagaagatatattgatctagaaaatgtttatacaactgcttatatatgtgaaaataaatcttctgttcccttggcacataagttaaagatattctagaaccatagcaccatcacatttttttttctttttcttttttgcgaactgggatgcaatacagcatctggggaaagataaatgaagaaaatccaatacatgaacagatgttactttacatttatgtggtatttcagactctacatatgacttggggttggctacacgtccacgtggaattttcccaacattgctatgaggtaggaatattaataacatttttcagataaggaaacaggaactcaagaagtgaagatccagccagggaccagtatcaggggttccgatgttgaagtaccatgcttttctcactccaccagaggtggcttggtgatgccatatgactgacggaaagtaaactgaactttacaaccttaatttgtccccagacaagttacagagcctaatgaaaaggagaaagaattgcaacacagtgattaattactgagttgtggcatgaaatccctgctccatcatttacttgcagtatgactttggaccagtttctttcctttctcagccttagtttttttgaactgtaaaacgggtttaataataatattttcttcaaggctgttgttaggattgaatatattcatatatataaagttcttattatagacatttccccacctgcacttattattattattgtatcaaggcgtggattctaactcttcttcagtgttaacttgcacattagtctaggatgttgcttgtgggcttttgtttgtaagcttgctctaagagatcaggcactttgaaaaaaaaaaggattaagaacttcaccaaaaagtaatttatcttaaagtctagccaaagaaatccatataaatatttcctaaccatttttgagaagtgggtaaaaggatcagaaatcaagtgtgacatgtggaaccaagcatattagcaactgatgtagcttggcttgcaggaaatgtgcaaaaaagagaaaagtttcattgtgatcgtgcaaaggagtatctgtgctttgtcaacatcaattttgtgtaatgcctttacatttctaaagcccaggagataaccttggactattaaagctaggattttgctgataggacattagaagatgaagcatttcatgacactgttatttaatttggagagaaaagatagactttggaaataaattaagactaccactttcaacactaagagggtcagagcaaggagaaattctggaaatgttttaggatcgtgagaggcttatacaccagggatctgtgtgcagacaggaagtgcagatcaagacagtagccttgggctctcggctgaaccctgaattaagtaagtgataacaacacaggacgagggcatgctttcttttcattcccctctttttttttttttaaatacattctttccttcttaggttaaaagaaagaagatttcagtccttgaaaacaatcttttttttttccacttattaagaacctagaggagaaaggcaattgtcccatgcctgtccactggggaaaggagacaactgttcataatttgctgagcttgcagcaggaacaccataaaattaaaccaagtagaagactaattccactgttggggacggggaaacattctagtaaagaagcaacttgtaaacttgtaaaatgagtcatataaagtgatgtctcaagaaaaataactagtgatatgtaatttaggaaatgtagatgcttcgtcattctaagaaaattactttatgaataaatgatactcaaggtcacagttgagtggcatgtctggaggtataagtggctaaaactagctgtacttaaagtaataaaaaagtatattatgtttctataaagctcttggtaataaaaatcagtaggaataagcaaacctaggaaacattttgaaataagagtaatttgatatggagacctcaattttccaactcaggtcctttttctccttttctgttcatgttgctaccacagcccctccctcgccccacctctccctttggctcaatgccctcatattccttatgccttctgtattcattaattcccaatctcagataggagtctgaaactccagcacctacagttataaaaactgacatgagatgatcatattttacctccccatttccagaattgcattttaataaagatcaaagattaatgctaaagtaatgatttcacatggcattcaggattgtggccagaaagtgggaatatggaggaaagggagtttgaggaagataggatcaataaaagggtcttaatgaaaacaaactacattgaaaaaaaatcccttttctacatatttgcaccaagggtactatgtgcttacttcagaaggtagagtttagcccttctaacaaccaaccaagttaaatctgcttttctcaaacagcaaagaaagacaattctctgcaatatcttattatggtttttctttgttagtatcttaaaaacactttaaatggtaaaagagaaattgcttgtggtttaaacatccagagggcaagatactttatcctcaactttttgatttcttcaaatacttacaaattattctcagtagaaaaattagacttattttcttcacaagtctatgagacagactacataacatcttaacataagtggccctgttgcatttcaaatatccagtcattggagcaattggttgattttggcagtctccatgactaatgcattaacttcaacctatcaaatgaactaaaaccaagtgtgtttgaatatttggtctacagataagcctactgggggcattcaaaccaatgagatagactcgacttttctggttctttcagactacattcaggggaacggttgcacaacagcttattagagccaagtcaaaaacatccatttcaaaagtcttcctttaaacaatatgctatctttgcattttgctaaattttgttacttgaaattaaaagctcattagaagcaagtcttccctgcaaactgacatattcgattacagtcatctgttctagagaacagactgcgtctagacagaagaataccgctgtggcttagaaggaacatgatgcgttacagcggctgattcttgggctgggtggttgtttttatgatctgcgttgggaacaccatgtgataaactattttgcagcttcccaaatgtgtataggtatgaacaacctcaatggctatagccataaacaaaacaagattgaattatggcaatgtggtggcgatgggggaaaacacattggccaaagataaatacgaaacggcggcattaaaaatgcaaaacaaaagcaaacaaaccaaaccagattaatacaaattaaagccaagagtctacgcttcatgggataaagaattctagcctttgttccatgttccaggatcttaacaactgtgtttagggcagggagtgtggagttatttattcacatgtacatggaatgggaacaagcaattggctgcttataagaattaagcatctgtcttgggaagcttcctctaaaacagagctgtactgagtgcataccatatgaaagcaaataggctaggggaatgctgttacagaaatttgtaagaaagcagtcttcatgtttttaaatgtttaggcttaaatgcatgtctagcctttcagcaagctacaacgcagtagagatgtttgatcttatgaagaatctcagtttaaatcaatttccttacagatgagtttacacatgcgataaatcacacatgctttgcaaagctattgccagtatgtaagaaaaggattctgctccacccccgccctgcaccccaccaacccttgaaattggtcatcattttgagactgaaaatgcaatcattgtcaattttctggtttccatggcttagaaatctgagaaggcaggggttcatttcttagtaaatttgccccctaggttagagaaggaagacgcaaatgaaaggagaggacatggctcatggtggttgctaagaaacatgcaactgaacacaggctgccccttaataatggccagagggggtgtgagctgtgataacatcggccatgatagctctgcctcctggcccagcaggggccactgctgtgggtaaaatgaaaaggaaggcagtcttgttagggaaaatgtaagaagacctggaaagggaaatgaaagcctgaggccctttgcacactgagatggtgctacaggtgccctgagggaaaaggcatgctttgtgttattttctactagtaatgaaggtggctgggattaggaatgattcacatgctgctacttgctcacctggtagctgacagctcttctttgaaagacctgggtcctgtgaattaatttatcaccctgttcttgacttaatgagcctcaacaaaaggagaaagggagcttagctctgaccaagtgagctaactagcccccaaatagctataatatagacatattatgccactgacatgatcagcacagcccagaagtccataatgcagtctctggggtctgggtgcaagtcctaatctttctagttggtgaccttgggtgagttacatacactccttaagccttggagtcctcattgtgtttaataggggcagaataatgtaacctacatgcatgcttattttcagcccgacgccacctctccctgtctactagcaacagactcccctctcttaattttagggaaatccctagccaacatatgtttccagaggggtctgccagtgagaatccaaacactcccaccaaaacccactccacttcagctacagtaattggtccaatggatgacaatgactcagaccaggctgatcagaatcctgccattgggatttaaaaactagattgaaataaaagttcaagtatgaccaggggaaacacttttttcccagtgatgaagctgctagagctactgttaaccacatttcctatcagtggataaagctggactacagaggaagagaatgacagtgacaagtaaagacatgcaaaaatggaagaatgaaactcttaaggtcatttgaatacctgactccagttcctgagttctccaggaccatcctggttctcacctcgcaaagatctagaggatgtttagatgagaaaatgcatgtaaatgcagtacagtgcctggtacagaagatttaataaatgtttaaattattactattgagtggggaagaatcattcttcctctctcatgcttggatgaaaaaattcttggaagagctgcttctccccacctcatttgttaactgagccccacagaaagtggcatgcccaggatgcaggaaagggggcacagtgtgactgcggagtggtgatctgcagccgagtggcattgctgacaagcagacatcaccctatcctaccatctgactcacagaagtaagttgcttcaattgcctagatgttccagcctccaaatggcctcattcttagctgtaaagaattccaagttttcaccaaattaaatgcaaacagtaaaaagagaagcgctcaacagaagcattacaaagatgaggttctggccctgcttctgccacttgtaagttaaaggcagagcgttatgtttgtagcaaccctttaagaagtggtaaaaatggagttttccatgtgtgtttacagcacttttgggaagatcacatcttttgacatgtgtgaactgtagagacattgagaatgtatgaagaattgttattattttcctagaggggcagagaagaattggtgttgtgactggggtcatttctacacatgtaaagaagggggttgaatcaaagatttagcccatcaattaacatattgagcatcttctgtgtgttacactgggttgtgttacaaccacggttcttgtgatgttcagagtctgttcaccgaaacagacccagagacgagaactaagagagcaatgaaatcccagaagaagaaacgatgacttaagtctgggaggaggccagggaaggagacacgaaagagctaatatttgatacgggttttgactgttcactgggtagagaagaggcggcattcctgagcagagataattatgctcaaggagtcaaggtggtgggaaagtgcagagtatgcttgggaagagccagagagacaatgtggattgtgactaaaacacaagatgtattgacgtagcagccttaaccttcttctggaacagacatagctaagggctgttgtactcctcgagatctcaatacaattgacttgataccttatggccacacccactaccaatttttaggcttgtgcaaatccaaaaccaagatttctgggaaattccagtgggtttctatttccaaggttgttcagctctctggaacatgcacattcgaccattgcctttttgatttttgcctgaaattctgcaccttcaatttctatcccaataaaatcattcacataccttaactcacattcctgagtttaggagtcttttctgaagattttggtctgtcaaattgcagccttccaccattttcctagccacacactctggtttcccattatagactcctttgggaatccaaattcttcttttctgtatgaggcagagaagaattatcttctgtccatctaggggcaaaacctgttcctccacttgtcttatgcccagtggtttagaaatggatttttgttgtttgaacaggcattttggatctcacagtccactttactttaataagtaagtattattattattatatatattacgattataatatatattatgtatattactattataaagtagcttaaaagctactttaataagtagcttattaaaaatacttctctaatgagaattccgatacctacaaaggtagtcacaagttttccatcactccacagacaagacaaaatttactaaatgaaaatagcgtgagttgctatggagaaggtgagaggtgatggaaagaagaaatggcttgggagagagtcgtggttgcacagccaacgctgttgatacccagctacgcagagggaggggagccattgaaggctttggaacttgggagtttggtgttcaatttatgtgttagtggggtcagcatgaagacaggttgaagactggatgtgatgggggagagactagacgaaggaagagcagtctgaggccatcataatagttgaggacagaactgatgaggattagcatgacagtgagagctcatgccgtggcagctggaaaatgagttctatagaaatctatgagtcagaggattcaaaaacattcacagctcattttcaattcaaatatttgtgaatttcaagggagagcaacccttccaaagttacagcctcatgtgctcatttaagtgatacacacattttcttaatcaggggaagggatatgagtaataaacttaatcaatgattggtgatttttgaaatcaattttgaatattatttcacatgttttaattttttagaagtctatttggtttgactatttgagacagtcatgaaaactttcttaggtctttttgtgatctcaaattcatctttgtcgtagcctattaatttactgcagacataactttccatttacctaataaatgacaatttgtgttgtgtgtttttaaaaattttctcctatgccttgaactcatttctgaatggaagtcttcctatctcattaacttccctgttgtgtgtatttagaatccactcattacgtgttccttctttccaaccccaaatttgtgaaaattcttttatgaaaagacatgcttatgcatttaagattacacatgccttctaaaaattcctcacattatatctatgctccttcaaaaccataagctacaaacactaggtctgatcatacaggggaaataagagggacttctttttctttctttctttcttttttttttctaggcatgtcaattttcaatcttctgggatccatttagtgagctggagatgataatggttcatgagatgctagcagcccaaatcattaggagcttatatagtctttctgtcctgggactaatatatttttgttgacaactggctccagcttctcccacccagctggcctttctcctgtttattgtccctggggcctccctcgaagcaaccctactgttctcaggccccagcccatctagcaggctgtcatgatgctcagacacagagtcagcagcagcagggctaggttcaattcccagcactcttccacaggatagagaacaattaaatgtgaaaactcacctttgatttattaggtatactttgtggagtctgaaatgaaacaagtcgagatagttcaagtctacattgctcacattaaagatttatatacaattccaaccaactcaggaaaaggtctgagctatagataactgcatatttataggttgttgatgtctttgcattgaggtaaacttttctcttaagttatatgaattaactgtaatgttgggtagtcatcacctgagaaatttattgttatgaattaatccgaccccaaaagctaggaggaactataatcattatgataaagtgattgaatggaagacaaaatagggttcagggagatgtaaaactaatttcaaggttatcaatatacgcattggtgattgtgtagcatgtatgcgatgtcatcccaaagaagaataacttaatctactgtgtgcagtagataatgggttgtaagctaaacaggggtctgacctctagtactttaaaccccattaattaaatctgtgccagggaaacctaggaaagcatgttagtatcatggatggggggacacacacaaatgctgtcataaggcaagatagtctttggtactgctattttaaggatcccttctttctactgcttctctgcagccagctctggaatgatgtatatttctcatttcttcagggtatattatttctggaaggttctaaggtcatccttgtgcatagctgcactgcatagtgtggagtgctttgtatatcttaattgccagaaatgcctttgttaatagcccactatctccctatcctctcttccaacattgtctgaaatttccatcaaggaggttcttccctgatatttgacaagacctaaaagagttttgtttccaagacactcataaactgcagacactacatggaagagtaaggcacaaatgggccaagcagagatgtcatcactagaaaggaatgagcctgaggagaagaccagcacgttgctgctcaaaatatagcccatggaccaacagcgtcagcatctcctgggagcttggtagaaacacagaacctcaaaccccaccctgctgagtcagagcatgccttttaccaggatggtttatgtgcacacgaaatttagtactcaccttgaagaaagaggggcagcactgttaggaacacagatggccaggccaagatgacacaagagatgattgaagattgtattaggctgcttttgcattgctataaagaaatacctgaggctgggtaacctataaagacaagaggtttgattggctcatggtcctacaggctgtacagaaagcatggtgccgatgtctgttcagcctcttgagtggcttcaggaagcttacagtcatacggaaagcaaaggggaagaagcacgtcacttggctaaagcaggagtgagagtgagaaagtgagaaagagggagaggcagggagatgccacacacttttaaacagtcagctcttgagagaagtcactatcacaaggacagcaccaaagagatggtgctaaaccattcatgagaagtccaccctcatgatccagttgcctccaaccagtccccacctccaatactggggattacaatccaacatgagatttgggcggggacacatatccaaactatatcaaagataaacaagctattttgccaaagactcttctggagcaatattctacccactggttcccaaagcagtttgaccatctgattcattgcttacaactatacatttcaagatcacaccccggagattcatatttcactgatctgaggaggggcccaagaacctccattttttagcaagcacctgggtgattttcctgtaactggctggtatttgaatcttctacagattcaactagctactcttcagcctcctgagtggtcacagaagttttcatactctaatctctaatgtgagcttagaaaaaaaagaccttgatatataaaaatcagaaggagatgagtcgtggaaggaactgctgcttgttctaagccaccattatgaattcctggccatcccaggcatggtggctcatgcctgtaaccccagccctctcggaggctgaggcaggcagatcacttgaggtcaggagtttgagaccagcctggccaacatggtgaaacccgtctctactaaaaatacaaaaattagctgggcatggtgggacgtgcctgtaatcccagctacttgggaggctgaggcacgagaattgctggaacctgggaggaggaggttgcagtgagctgagatcacgccactgcactccagcctgggtgatggagtgagactctgtctcgaaaaataaaaaataaaaaataaaaataaaataaaataaaataaattcccggccatcaatatcaggatgtggttgctgagtaatctagtaacattctcaagtctacggccattttcagacttgctacccacgaaaatctgaagttatagacctacatttggtgttgccctgactagagtaatccaagacagctgatgaggtgtgagtctttatttagaagcatatttgtgaacacgttgaggggaaaataaaacgatttagaatgtggggtgggcagagggttgtgtcctcagtatcacaatagtgcttgattctgttgttgtgatcttatcagaaaattataaaaatatctggccggttctggtggctcattcctataatcccagcactttgggaggctgagacaggcggatcacttggggtcaggagttcgaaaccagcttggccaacatggcaaaaccccgtctctaccaaaaatacaaaaactagctgggcgtgttggcgcaccccagtaattccagctactcgggaggctgaggtgggagaatcaattgaacccaggaggcggagattgcagtgagccgagattgcaccactgcactccagcctgggtgacagaacaagactccatctcaaaaaaaaaagaaagaaagaaaaaagaaaattataaaaaatatcaatgtagtgtacactgtttcacttagacatttcttaaaacaagggtcttggccaggcatggtggctcatgcctgtaatcctaacactttgggaggtcgaggtgggcaggtcacttgcacacaggagttcaagaccagcctgggcaacatgacaaaaccctgtctgtatgaaaaaatacaaaaattagctgggcatgcctgtggtcccagctactcaggaggctgacatgggaggatcgcttgagcccaagaggttgagccttcagtgagctaagatcatgccactgcactacagcctgggtgacagaggaggagaccttgtcaacaacaataacaacaccaatcaaccaaaccacaaaagggtcttcattgtctgaaataaaaaggaaatttcaagccccatttttggtcaactgtcagcatttgccctctttggcccctcttaaggtttcagaagaaacacccactgatatggtttagatattgtcccctccaaatctcatgccgaaatgtgacccccaatattggaggaacccagtaggaggtggatcatgcgggtggatcactcaagaatggcttagcactatccccttggtgataagtgactccttgctcagttagttcacatgagatctggttgtttaaaacagtctgggacctcccccttctctctcttgctccctctcttgccatgtgacatggctgctctcccttcctcttccaccatgactgtaagcttcctcaggccctcactggaagcagatgctggcaccatgcttcctgtacagcctgcagaactgtgagcctaaatacatttattttccctataaattacctagtctcaggtattcctttagagcaatgcaaacagactaacatgctcacctctccacagtgtccactcctctcctcaagtcataggaagccagggagcttctcttgtaaggaaacttgcttcacataccagcagagtttggaaatagttttctttactccaaagaagccaaggtaagaagtatagtgcagggggcaagcatgcgaattcttgtgtcagtctacctacttcgaatcctactcaattcttaaaagctatgacaccttaggcaggttacccagagttcctgtgcctcacattggtacctaaaaaatgggataatcataatacctgtgtcacagaactgttgagaggattaaatgagaaaatacagggccatctttctggtagataaagcattgtcaatctggtagatagccccaaatagcctatttgcctagaatcctgcaagagcccatggaagccaactgcctagataccttctttcttggcctccttattttccagatttctccatcccctgcatggaaactggtactcaagggtgacgttgctctgtagtgtagcctattaggtgaggacaggtttttctacctctcttgcttacctcatctctcagagtcttgaccctactatggttttctcttaaaaaaattcttgaaatgacttttctaatttcaagttataacacatctgaaattaacttgcccagttacaacacatctgaaattctaaaggcccttcccctacctgtcgtgcaaatccccttccgtctagtctctggcctaaaaccagttgagatggaccctcctcctcgggaagtcctgcctctttctgaaggcagggtgcctgctgaatctggtccctgtggccctgtttgctcaaatggcttctgcagttttaaggggaagttggaataagacatgtgaaaaggggagggtggaaactgaaatcttaaaagacaaaacaaatgagcactgagcccccagcttgcacatgtaaatccatgggaatcaaaggcttgcagaacggtggcagtagtcggctgtctaactgggaggatgaacagtatgctatgtgctgatttggctgaaaagactgtcttccctagtaagcaaattattgattataaactgttatgattccttcggagccattgtggccaaccatattattccatctgccttaaatgcctgctgtgttcccatgccaaaacccttatgaaatttccactggaaaaaaaaaatgagtagcaaattcaggtctcagtgctcatatataatttcagatttcattaatagttattaaatatatgccctgaggaaggataaagttcctcatatgaatggaaagagaattgaatttataaataaggtgattctgttttcaaggactgttcattagacacatccagtgcacacttcaaaaaaaaaaacatttaaatgaaaggtgtttaaaatctcacaggataaaaagcaatgcaatgttgggaaaagataggcttgctcaaaaaaattttaaaaatgactaattcggaaacatttctctctgcctggagtttgaaaatgaactttggggaaaattcaaaaaagttgtaaaatatttttatatcgtgtccccaaaatatccacatctagaaaatagtgatgcatgtattggtaggtggcaaactggatgctaaaagcatgttgaaaattggtattaatcttttttaaaagctacaattataaaaataataaaatagggtatttaagtaattttgactaagcgaagccctttgaagttttaggctactaagccacataacctggacaataacttctgtagtgggagttgtcaaaagtccaagtaaaaaattcaaatccttttcagacctgtcacaaatctcctgaaaagctgtacaaatggtgtagttctagcttaatgtgaataagcagatagagaaggtttgaaagagatatttaagttggcaaaagttcagaagaacagagtggttggtttggtttttgtttttgttttgttatgagggcaaataaaatatttgcctgagtgctgaattcctgaagagagatattgttgaactgaagacatttttggatcaggtgagttctcttatttccactgaattgtcttattagaaaagaatagacaagagagtttttttttgttttttgttttttgttttttttgtcatctgtcagcctgctggtacatcagctgccaccagagataaaacgtacagaataccttcagacgttgtgggttcaaatgttagcttttctcactgaaaaatgtactctgctatattttatgggaaaaaaatgctgttgtaaataaccttaacataactgttgaagcaatgaagacaatttttctatttgaattttatctcgtaagaccccctgaaatgaaattttatcttttaaaataaacacttcccaaacagagagagactgagatcaattaagccttccctcctgctttatcttgttttcatttcccgagtgagcgaggtgcactgtatgatggtgatgcgattagccgggtgtgtgggaccagagggccattttctatggccctgcaatctccatgatcagtctagggtctagggaacatttcccttggaaagttcacattacctcaagtgaaaagtctcgttattgaaaaacagtaattatttagttgcaaaatatattaaacataattcttatttttattgttttgctaggtagctaaattcaaagttgtcactaaacatatgaaaatgttgggttttatattacccttaaaatatgttttcgtataagtttgattctaagatatgtgatttttaccaggctgttgctcataccaacagtccaactccagagaacttgcaggaaaagtttgaaaaagtaatcctacagtgacattgatataaggggataagcaagaaaacgttagtgtaaatcctatttagctagttataagttggactgtggttgaagtttgtttgtagattgatgatttaaacagagatgctttggaaaaataagcaaagtccaaattcaaatatgtcccctgttaagacatagagaagtaaaagtgattcacggagaagattgcagaaaacaaaaatctacctccctctctagaacagtaacaaaagtagaaaaactgaagaatattgaaacattttcattttcccgtatatagattttttttttgttgttgttcaagagttgctgatgggagatagtaactaacctggcaatgagaatggaaaaatgaattgtaaaaaccaaacaaattaaatgtcagatgatgctttcatgtagcaaagggagttatctgtcattcctcgagaagcataagaaaaagaacagatttaccccctacttcatggcaaagacatttggtaaaaggcagactacagcatgactaaaacagaatctcaccaccccccaagccaggggtcgttatcgacagcataaaagctcaggtggcagctgtggaattccaaatgaactaagaaatgtggagcgagccaacctagttcagcgggaaagaatgtcaacaatttccccatggactcctgggagcctgttgtgagcacatctctttatagccttcagagaaacagaggcatatgaagaacagcccggggaactgagaaagagttccagaaagtttagaatgtcagagatggcccactgaagtaaagaaatatgagaacaaaattgaggtggggaaactggtggaaaggagacagtttgcttctgttttctgttgctaaatgctttcctgtgcttgcccgcccacatgctcacaacttatgaggaagcaagaaaagaagctgcactttgcaaaaaatatctaatgaatagaattctactctgtgatgtgaatctatcactaattttcttggtgacatgacaccaccttaagaaatgaaatgaacaagatatccaggacataatcacatttctctgtatatgcacacatacagcttcatatggacatgcaaaattaagagcatatagcatacggccacttatgacagggcatttctatagtccatataaattaagctcctttggaaggagaaaaaaatcccatgctacttatttatgcaagtgttttcaaataagtttctctatttgataagtgtaatgtaatcatacacaagcgagcaatgaaattagaaataaagacattgcatgttaggagcaaagtaggcaatttcataaggagcttttaattctgagagcatttcgaatggagtatttgaattgattttatctaattaatatgctaaattacagtgaacaaagaaagacaagtacaatcgtgtagggcatgtggacttgtagcatttccaagcagggaggacctttgggagtctccagtccaactccctcacttcacagacattcctaccatgtgaagtcacacacacaagctcgggtcaaggctacgtgtccagtcacttatgtatgcatcagaagggggagatagacacacactcaaacacacagagaaagaacatgaaaaacaatgcagcatacacttgtggcaatgtactctcctggaagaaaacatacaggttttgcagagaagagggattcatcagatataaagtcaggcctttatgttgtgggctgaaagctcaggtggcatatatagatttccagataagctaaaaatgacaagtgtgcagaattcacttgcaaaggctgccagcactttcccgggcattggacccaagttgcattgccatgttacctctctgttgtcctaagaaattgaaggtgctctcaccatgtttgaaaacctcccaaattaaaatcacctctatgacatgaataccaggagcaccaggtctcagtctccatagcattttcattgctccctgcatgcacccagacatcttagcatggtggtccttgaacttgggcatcagcctcagctggagggcttgccaaaacagattgttgggtttgaccccgtcagaattcctgactcagtaaatctgggtggggcctgagaatctgcatttctaacaagtgtccaggttgtgctgctgctagtgcaaggatcacacttggatccaacacactgcactagcacagcttaggtttgctgaaattggattaccgagttgacagatgaaaatgattctcttttattggaccacataatggatgtgtgcatctgtcacctgcagatgaaagtggtggcaaaatgtgaaatttctagcattgccatcaggaaaatattgacaagcatcattaggaaaattttccaaagcggggtttaaatgatctccatgtgcaagatcaatgggatggaacatcttttgaaaagttgtttcatcaatgaaaactaaaatgaatacttgctgcaattgctgaggtttatgcatgcagttccaagaagtgtggagaatttttaaaagtcattttttttggattaaattaagtatttctgaaactatctcattagaaaagaactttttcattattgaaactttacatctgaactcttactttttaaagtattacatagtttaagctggatgttctttttcttgggttttacttttcaacaggaaatggaactctatcgaaataaagaaataaatgttctgcttacatgtgctattctgaacaacgtagttatttataaaggggggtttctatttttactaactcaatatgtaccagaaaaaattaataatttaaatacagatttgaagacaactcaaaattttattaatcctaataatggttttaaaccatattaatgtacatcaattggtctcataagtcactttatttatttatttatttatttatttttgagacagggtcttactctgtcacccaggctggagtgcagtggcatgatctccgctttgcagcctccacttcccaggctcaagttatccttccacctcagcctcccaagcagctgggactacaggcatatgccagcatgccctgcttttttttttttttgttttgtattttttgtagagatggggttttgccatgttgcccaggctcgtctggaactcctgagctcaagcaatctgcccgtctcagcctcccaaagtactgggatttcaggtgtgagctactgcacctggcctcataattcactttatattttgcattaaaactagtttgtctatcaagacagatagaaagtgtccttgttctaaataggtttatttgttctccttattaccctcatctgaatctgtaggccactgacaaagagttttttcaggtctccaaatgactccatgttttcttgaaaccagtctttaaacagtactttttctttcttttctttcctttttttttttttttttttttttttgagacggagtctcgctctgtcgcccaggctggagtgcagtggcgtgatcttggctcactgcaagctccgcctcccaggttcatgccattctcctgcctcagcctccccagtagctgggactacagttgcccgccaccacgcccagctaatttttttgtatttttagtagagacggggtttcaccagtagagagatggtctcgatctcctgacctcatgatccgcccacctcagcctcccaaagtgctgggattacaggcttgagccaccgcgcccggcctttaaatagtactttttctgtgttgctctcctccaaatttaactaaaagggattttatgtcttgtttgtaagcttcaagaaaagctgcaaaaatttaaagaatacaaattagaaattatatcaatttaacaagcaaatgaagcaaacaatttaaaatctgaacacagtttattgctttttcaccggcaggcaaatgattatgttcccacagtgtaaactttcctattttgagtcttttatcctgtaaaacactaattcctttatcaggaggtcccaaatagaaaatactcctttttcaatggacattgacaacacgcatgtatgctattattacgcactgaaggtatagctgaactcatgcaatcttgctagtaatttcactttggagatttgtgataagatattgccatagaatgagactttgaagacatttagtcctaagcgagtgctgttactcaattttgcataacagtttcacatttgaaggagaccgaggaaatgctggcgacgcagggctgaggcacaactttgatgtggggcctcttggtagtgggccaagtggttctaattattttcagaactttctcttgcagtgggaaggagttggaaagaggatcacataggcgcacaaatctggttcccaaagtgaagtgagatgagaaacgcttctggtgatctatgccagtgacgggtgagataatcttccttccttcccctttgtgatgccactttcagcaggatgcttcttcctctgctcacctggagcgcctgtgacttctctctccctaggggacggggagggagtgccctgatgtttcttcactgcctccctggtcttcctctgaccccaccctccgccactcccccaaccccatttgtttcttagccacctctgtcatttacatcactgtgttgcctgccccatacaggaatctgcacccatttcatttgcacaagttcccattctcaactcctcttttcagggacaattcagcactcaagttctctagcataagaaatgcctgtgtggtttgtaaagcacaatttacaaacagatacaaaaaattttctaagcgagtgaattcagttgcttgatacattaggcaagaagaggccaaatgggaatctgggttggagttgtccgctgactcctgaggacactgatcttctcctagcggactctctcgcatagtcgctgctagctttgcacaagcctctcttccaggtacacataaactttgttgatgaaatcctcataccgttctgagaagcattttttccaaccaatctgattttggagttaaacacattgcatcaagtcgatcacaaattacacctgtgatagatcaatgctcagtgcctgacaatgtcctggatagtcagtcaagggcaggtgaaggcttgcactcggggggaagtaagagagcacactgccttttataaatctacaattgtgccaattctgcaatggttactgcatatactgctcacgtttctcttttcattcttctgctggtttgcttaattgaatccccctctctctaaagatataagaatgtaatatcacttacattctttatgccaaaactgtaaaatgccttttattttcttggatatgtctcagatagcaaagaaaatgaaaattttacatttcctttttatactgtccccacaaacatctcataaacatgcttttgcataggtataacttgcgaggggaagtattaatatggagttgtctttgtcttcaaaaaacaaaacaaggtcggggtgcagtggctcttgcctgtaatcctagcactttgggaggcagaagttggaggccaggagtttgagaccagcctgggcaacataaggaaaccccatctctaccaaaaataaaaaattagctggatgttatggtgcctgcctgtagttccagttactcaggaggctgaggcaggaggattgcttgagcctaggagttccatgctgcagtgagctatgattacaccatgtcactgcactctagcctgaacgacacagcaaaaccctgcctctaaaaacaaaacaaaacaaagacaaaaacaaaacggaaaaaccccatcattgccatagtgtctgttaatcactgtgacaagtccgtaattatcttgcttgctcttccagctgggtagaatctatagaatatttaaaccaatccatacctcccgccttgaaatgaattgtctaagctttgctatcatgttattttctatgctattactttattttctattaatgactgtatgagtgccttagaacagcaggaagttattatcttatcacacagctgatatcaaccattatctctcactcagaacaacagacagcaaggagatgattccttttaccaaaatgtaaggctaataatacatttaagtaaattgttaagagagtctaactatgtagatcccatgttcagctccttcattttacacacacacacacacacacatacacacacatctgtgcactaacgaattttctataggtgaagaatatgctgctttcctcaaatgtttatgcctttttaaatttaatcaatgatgcagtattcaactgggtaccaataaagttttgttctctgaccaagtacactggagtgctggaagattggccccaatccttcacctctccctgtatctcagccctttgccacagtacactgtgggcagggtgtacttctttgctccttgtcttggtcacatgacttgttttggcccatggaatgaagcagaagtgacagtgtacctatcctaaaccaaggcttcaagaggtcttatgtgttttcacttgttctctttcaaatttgctattgccataagaaggacatgcctgggctagcctgtccatacaaagaggaggatgacaaggacttagagtaaagctctccccatgccaagcccaggttagccaacacccagttgattggtagacttgggagacataagtgatagtttttctaagccactatgtatgaaggtagtttgttatggggaattaggtaactgatacagcattaagtcgccatcaggtgggtttggtttacagcattgattggtagtggttcatttcattagcttagttttaaatttgatataatgatacgttaatattactcagtataatcttaggagaatcataatagaaatagattggctttaactacagagccagatgactctatatttatagagagggaaaattcccttatctttcagaacttcgatgtttgcacatctgtaaaacaataattacaatatttaccttgaagggtaggaatccatggataaagtatgtgatctacccagcatatggcagaacaacaaataaatgttagctattatttttattcagtacaatctgtgagagaaagtctattaatacttgggtcattatttgtattcctttttcttttatttcttttaatgttttgctcattttcttccggttttacttatataactcttcgcttttccttgccttctgaaaaattcaagtataaagtctaccattctttttgcccagggtccaaaaggatgatttaccaaaaatggaaagacccactgagctatttatactgctctggacacaagtttcatcttatggacacatttccatcttatggacacatttccaaacacaaacacaaagtttgttgttgttgttgtgtgttttttttttttccaatatcggctcactgcagcctcaacctcctgggctcaagtgatcctcccacctcagccccccaagtagttgggaccacaggcacatgccactacacctggctaattttttgtattttttgtagagacaaggttttgccatgttgcccaggctggtctcaaactcctgagctcaagcgatccgcccgccttggcctcccaaagtgctaggattacaggtgtgagccactgtgcctggcctctaaacacaaagttcttttgaaggaaaatcaagcagagcagatcactaaacgtattccttaaatatgttctcttccctcccctatcctccataaaatcccacaaataagtatcagatataagtgagatgcttcctaatttaaacccatgatccactgtgtaggaagcaatgacaacagcaagacgtttactttcctttatgttgtagccacagaagtgatcttagtttagataggcttgtcaaatgattttgccaagagtgggcaaactttttctgaaaacggtcagatagtacgtattttccgctttgtgggccacatggtctctatcccaaatatgcaactcttccattgtaacatgcaagcaaccatagacaatatgtatagaaatttacatggctggtttttttttttttgccctttttatttatttatttatttttattatactttaagttctagggtacatgtgcacaacgtgcaggtttgttacatatgtatacatgtgccatgttagtgtgctgcacccatcaacccgtcatctaacattaggtatatctcccaatgctatccctccccccttccccccaccccacaacaggccccggtgtgtgatgttccccaccctgtgtccaagtgttctcattgttcgattcccacctatgagtgagaacatgcagtgtttggttttctgtccttgtgatagtttgctcagaatgatggtctccagcttcatccatgtccctacaaaggacatgaactcatcctttcttatggctgcgtagtattccacggtgtatatgtgccacattttcttaatccagtctatcattgatgaacatttgggttggttccaagtctttgctattgtgaatagtgccgcaataaacatatgtgtgcatgtgtctttatagcagcatgatttataatcctttgggtatatacccagtgatgggatggctgggtcaaatggtatctctagtcctaggtccttgaggaatcgccacactgtcttccacaatggttgaactagttgacagtcccaccaacagtgtaaaagtgttcctatttctccacatcctctccagcacctgttgtttcctgacttttgaatgatcgccattctaactggtgtgagatggtatctcattgtggttttgatttgcgtttctctgatagccagtgatgatgagcattttttcatgtgtcttttggctgcataaatgtcttcttttgagaagtgtctgttcatatccttcacccacttgttgatggggttgtttgtttttttcttgtaaacttgtttgagttcattgtagattctggatattagcccttcgtcagatgggtagattgtaaacattttctcccattctgtaggttgcctgttcactctgatggtagtttcttttgctgtgcagaagctctttagtttaataagatcccatttgtcaattttggcttttgttgccattgcttttggtgttgtagacatgaagtccttgcccatgcctatgtcctgaatggtaatgcctaggttttcttctagggtttttatggttttacgtcttacatttaagtctttaatccatcttgaactaatttttatataaggtgtaaggaagggatccagtttcaggtttctacatacgactagttacatggctgttttctataattcaccgacagctggtataaacaataaactctaagacaaaaataatgatgatattaaaataaaattagccacactaaagttcaaatatgttcctaatataatatttacatttcatgtaaatatctcttgggtttatcttttaaaccttagaattttttttaaagctctgtgtatgataatcaaaggttagattttatttattgtatctatcctcatggtctgaagtttctcaacatttacagaacagaatttcttagcacaaattctgcctggcaggctggtttaatttaatttctgtctaattgttctctgtaggactttcattctgttatttctacatatgtcaacattgggtctatgtggcacccatgtaatggtatttccacctatttgcatgctatgccatcctattttgttggtgaccatattggacaatacactttttgctttctaaatagtaatcaacaggaatatcaatggtaatatatatttttcccacggacttttctgtagaacctctccttggcttctgaaagcttataatgaaggcatactcatacaccatttttatttagccctcatcatgttaacaggctctcacacaaacccaataattactgtggttcactcttgtggagactggctaactaacatgctcagcccataagaaaaatattagggaaaggaacgcacactctccaggttcacactcacccagctgcccagacatgctaaagaagtattcatgtgtgagcccagtttggtgtgcagatgttggagaatggcttgtgaagacctccatgatagcattaagccttctgcagagtgaactagctcaagatgaattttttccaggttttcatcattaaaaaggtttcatttaccaagatgggtttcagcaatctcacagtgtgacattgattttatggtgtaatttaatctgtacttaatttcaaaggctggtattcagagataaagctagactttgcagtatattcctcttgtgaggcacaatgcaggttccttctgtcttccagaagaaatgatttatcatgtagcatgcgattgatcaagccatggggtttcctttcatcttttagcttgtctgtattcacagtttttaaggctcttttcttttactgctcatatttttattatttttggttttaaaccattatagccaaaaatgttgccaatgtgggctttttaaaaattctagtttatcactgttaatgtaaagagtgagtcaaaaaattcatgtgaaactggagtcctggtttgaacaataagcatgtgcagaaacatcactgtttttaaaagctcacttcccaataccatatgaaaataaacggatgtttttaaaagcagaatttgtgtaacaattgttaataaaaagctaaaagctgacacaaaactctttcatctaggaagtatgctgtctaatatcatggatgctaaaagacaaaaagaaagaaagaaagaaaagaaagaaagaaaaagaaagaaagaaagaaaggaaaggaaaggaaaggaaagaaagaaagaaagaaagaaagaaagaaagaaagaaagaaagaaagaaagaaagaaagaaagaaccaaaaccaaaatgaagctcaaatctcagaaacagaacctcttgccttagggtctgagcagggagaatacactcaaacacccaaggggagacaggcagggtgcagccctgagggtactgatgggacataagaaaaagaccaacaatcgtgccacaaaggccccatcggctctgcctctgtcttgggcagacagttggtcatctcaagctcaccaggagcaaaatttttgtcacaactggagagggtgtgctaccatcatttagtgggtagaggatatgtaggggactactacagatcctgcaacctacaatgcacaggataatcgccaagcctggcctggagggtggggctgggggtggtggtctatggtgaactggagagcacaagcctccctataggagcaacatatccaaggatccggctgatgtggtcatgtgggaatgttccatgcagacacagaaccaaaccaaacaaggacttgagatttcttcagaatacaatgggatgacttcaaattatatttagaggcagatgagaagaatcaaaatttcttaaaatattttgccaaaaacacaataagaagaaagctgacttatttcaacccaaatcagattaaagaactgggtagggctggacatggtggctttaacctgtaatcccagcattttgggaggcagaagttggaggatcatttgaggccaggaacttgagaccagcctgggcaacaaggtgaaacctcgtctccataaaaagtataaaacttagccgggtgtggtagcatgtgcctgagtcaggaggctgaggcgggaggactgcttgagcccagcaggtcaaggctacagtgagccatgatcatgccactgcactccagcctgggtgacagagcaagaccctgcctcaaaaaaaaaaaaaaaagaaaaatagttgggtaaataattggatttggactcacatgttgacacagtgacgctaaaacgaagatgtcttctggggctcagggcacacaacctgggtgagagcagcctctatgtcccacattttaggctaagcatctaacccataaggctccatgttagcatcctcagtcagcctgtaatggaaattcaatgcaggcaataaatgaatttcatagggctaactcttttgttttaaatttagaaagacatttagtaatcatagggacaaactgggtatgtgattgaaaacatttttaatgtttaagagattttggctcattagaaaatgggcatattcattcagtcaataaatatttgtcaaatgattaaatgtattagccttttgatttctttctttctttctttctttcttttttgagatggagtcttgctccaccaggctggagtgcagtggtgtggtcttggctcactgcaagctccgcctcccaggttcatgccattctcctgcctcacctctcaagtagctgggactaaaggtgcccgccaccacgcccagctaattttttgtatttttagtagagacggggtttcactatgttagccaggacggtctcaatctcgtgacctcgtgatccacccgcctcggcctcccaaagtgctgggattacaggcatgagccactgcgcctggccttgatttcaattttaaatgtgaaattgattttaggcttgtgattgtaagttgaaaaatataacaggattttactgtttggtaaataatactggactctttaagtgacctttcaattctctcaataagtatgaatatttaaaacatttaataagctagaagacttaaaagtttaaatggcaaaatctaaatatttaagagttttaatggtaataaattgaaatatttaatgtttaaatagtaatgaaattaagtatacatatttattgaataaatcaatgtatttattagatttataaaagttgtttacgtttctagaaagaatttgcttgtgtgggttgtacgtttgcccagctagacagatacttgaatggttaaacagaaaactgaatatattgactttataaatgtacactaacatgtataaagaatttttgctaattaagtttataaatgagagcaattgtttgaatttaaattgttcagttcaaatttaactctaatcaaaaccctctgtgaaacgagttgtttttattatatataaaagatactggtattattaatataagcagaaaaatgaaacttttttttaagttgaacttaaaagcttgaggaaaatcttgattttataatcataataaattaatgtagatttaaaggctatataactgtaaatagccctttctaaataaaaaaaaagaacaagaaaataagaatgccagtcttagacatttaaaaaattatgaataacagctaaatttgtcttttggcaatcaagaaataatgttctcattaaacaaaggtgatgtgtcagaagggcgtgtcactttcaatgtgcagtaggatgctgaggatatagaatcagtccctatcttatcatcttgtgtcactggttccaaagtcacatgatttctggagccaactctgcatgcctcatttacctctaggacaaaggactttatggctctgggcagataaaacaatgggggctcagttaccattcaacagaatacaagaatattagttctgaaaggaccctcactctcctcctcacttttagagaaagaacactttccccagtggtgaaatggccaggactggtccttgggggcagtgttaactctccatccagggcataaactttggaggacatttccggcagggttatttatatattcttccccttctgttagtttcttagggtatattccaccatatttgccagtttttatataacaacggctccaaacctccatgaattccttttctgtttgagcaaatgagtaatggggtgccacaaaacaaagtatatggagacaacaaacttctgagaactgtccaacagtgatgtgtgaatgggtgtgcacacatgtaggaggggacatgaaagtgtggaatctactttttttgtctaattttctatcgtttacaaaaacttgaaaatgataccaagactatgctacacaatatcatgacatgcaattgttaaaagaggcatattactttacttttttctttcctgctctgcctatttagaaaatgtatccaaataacccatgatggcactttataacagccagaattgatagtcagatagctcttaggctagtaagctgaaaataagagctaaaccctctttatcctaccgccttaaaacaaaacaaaaaacaaaacaaaaaaaccccaaacaaaaaaaaaagcccagtaggctctctatgtggcagtaaaccatatagtgccatctactggctgtttactaatacgtgttattcaatcagggccaccaaacaaaggcattagatgggagacatgggagaagcaagctctgtcctcactctttcctctgtgccttgagactgttgtatgccctcggaaacacagagatggcaaagctccttctatgagaaagcatttcccatttccactgggacccatttttttctttcttttcttcaaagaagcacacaagaactgaaaaataccttcaatttggcttggccatcaacaaacacatttctaagcaaacaaagattacgtttaactccctcattttcttttcccactcctgttcttttcaataaaaagattaactaaagctggccaacaaatcaaggcaaatatctggagactttgaatcctgcaccgaggcttcataccgcctggacagaaggaggcaaggataattgagtgacgactactctagcatgaagtatgctgtttgtttctacttgttggtttcatgtttcaattcattgtggcatcagggcaaacggatttttgtgtaagctcttagctgagatgatactgctgagcttttgactgtcctgccatttccctccatgaattggcaggaaaaatatttatattttaatcaaatacaaatacacatgaaacagtctttttaggagtttcttttcctgtgtaatgaagtgaaatgaggggaaacgctgaactgactaatcagattcgccactccaaagaagctcaaatgtcatctctatggcaacatgtcagccagggtccgccctcatctcttccctcagactgcaaactgcacgttgccactgctacatgaattaatgtggagaacacactaaaaacagtgagatttggcttatgaagaaggatcttaaggttgatcccattcatgtaacactctatcctgtttttaattttctttcttcaaattgaattagtctttgaggacctgcttcacacaatggcttcactcactggctcctcactctgtgtttcagagggatgccaagttgttgagtcctttgttctgggaggggactgaggtcatttgcactttggaccccaaattgggcaaatctcagagaggtgatgcaatgcagaaggtgagtccagtgtatataccagggaactaattttaccatcttaagaaggcatgcaaaagtttatctattcattggaagatcacctattgaaaaatatgttatagttttctgactaaactcatcacaggctagtgtttacgtaggtagtccattagttnnnnnnnnnnnnnnnnnnnnnnnnnnnnnnnnnnnnnnnnnnnnnnnnnnnnnnnnnnnnnnnnnnnnnnnnnnnnnnnnnnnnnnnnnnnnnnnnnnnnnnnnnnnnnnnnnnnnnnnnnnnnnnnnnnnnnnnnnnnnnnnnnnnnnnnnnnnnnnnnnnnnnnnnnnnnnnnnnnnnnnnnnnnnnnnnnnnnnnnnnnnnnnnnnnnnnnnnnnnnnnnnnnnnnnnnnnnnnnnnnnnnnnnnnnnnnnnnnnnnnnnnnnnnnnnnnnnnnnnnnnnnnnnnnnnnnnnnnnnnnnnnnnnnnnnnnnnnnnnnnnnnnnnnnnnnnnnnnnnnnnnnnnnnnnnnnnnnnnnnnnnnnnnnnnnnnnnnnnnnnnnnnnnnnnnnnnnnnnnnnnnnnnnnnnnnnnnnnnnnnnnnnnnnnnnnnnnnnnnnnnnnnnnnnnnnnnnnnnnnnnnnnnnnnnnnnnnnnnnnnnnnnnnnnnnnnnnnnnnnnnnnnnnnnnnnnnnnnnnnnnnnnnnnnnnnnnnnnnnnnnnnnnnnnnnnnnnnnnnnnnnnnnnnnnnnnnnnnnnnnnnnnnnnnnnnnnnnnnnnnnnnnnnnnnnnnnnnnnnnnnnnnnnnnnnnnnnnnnnnnnnnnnnnnnnnnnnnnnnnnnnnnnnnnnnnnnnnnnnnnnnnnnnnnnnnnnnnnnnnnnnnnnnnnnnnnnnnnnnnnnnnnnnnnnnnnnnnnnnnnnnnnnnnnnnnnnnnnnnnnnnnnnnnnnnnnnnnnnnnnnnnnnnnnnnnnnnnnnnnnnnnnnnnnnnnnnnnnnnnnnnnnnnnnnnnnnnnnnnnnnnnnnnnnnnnnnnnnnnnnnnnnnnnnnnnnnnnnnnnnnnnnnnnnnnnnnnnnnnnnnnnnnnnnnnnnnnnnnnnnnnnnnnnnnnnnnnnnnnnnnnnnnnnnnnnnnnnnnnnnnnnnnnnnnnnnnnnnnnnnnnnnnnnnnnnnnnnnnnnnnnnnnnnnnnnnnnnnnnnnnnnnnnnnnnnnnnnnnnnnnnnnnnnnnnnnnnnnnnnnnnnnnnnnnnnnnnnnnnnnnnnnnnnnnnnnnnnnnnnnnnnnnnnnnnnnnnnnnnnnnnnnnnnnnnnnnnnnnnnnnnnnnnnnnnnnnnnnnnnnnnnnnnnnnnnnnnnnnnnnnnnnnnnnnnnnnnnnnnnnnnnnnnnnnnnnnnnnnnnnnnnnnnnnnnnnnnnnnnnnnnnnnnnnnnnnnnnnnnnnnnnnnnnnnnnnnnnnnnnnnnnnnnnnnnnnnnnnnnnnnnnnnnnnnnnnnnnnnnnnnnnnnnnnnnnnnnnnnnnnnnnnnnnnnnnnnnnnnnnnnnnnnnnnnnnnnnnnnnnnnnnnnnnnnnnnnnnnnnnnnnnnnnnnnnnnnnnnnnnnnnnnnnnnnnnnnnnnnnnnnnnnnnnnnnnnnnnnnnnnnnnnnnnnnnnnnnnnnnnnnnnnnnnnnnnnnnnnnnnnnnnnnnnnnnnnnnnnnnnnnnnnnnnnnnnnnnnnnnnnnnnnnnnnnnnnnnnnnnnnnnnnnnnnnnnnnnnnnnnnnnnnnnnnnnnnnnnnnnnnnnnnnnnnnnnnnnnnnnnnnnnnnnnnnnnnnnnnnnnnnnnnnnnnnnnnnnnnnnnnnnnnnnnnnnnnnnnnnnnnnnnnnnnnnnnnnnnnnnnnnnnnnnnnnnnnnnnnnnnnnnnnnnnnnnnnnnnnnnnnnnnnnnnnnnnnnnnnnnnnnnnnnnnnnnnnnnnnnnnnnnnnnnnnnnnnnnnnnnnnnnnnnnnnnnnnnnnnnnnnnnnnnnnnnnnnnnnnnnnnnnnnnnnnnnnnnnnnnnnnnnnnnnnnnnnnnnnnnnnnnnnnnnnnnnnnnnnnnnnnnnnnnnnnnnnnnnnnnnnnnnnnnnnnnnnnnnnnnnnnnnnnnnnnnnnnnnnnnnnnnnnnnnnnnnnnnnnnnnnnnnnnnnnnnnnnnnnnnnnnnnnnnnnnnnnnnnnnnnnnnnnnnnnnnnnnnnnnnnnnnnnnnnnnnnnnnnnnnnnnnnnnnnnnnnnnnnnnnnnnnnnnnnnnnnnnnnnnnnnnnnnnnnnnnnnnnnnnnnnnnnnnnnnnnnnnnnnnnnnnnnnnnnnnnnnnnnnnnnnnnnnnnnnnnnnnnnnnnnnnnnnnnnnnnnnnnnnnnnnnnnnnnnnnnnnnnnnnnnnnnnnnnnnnnnnnnnnnnnnnnnnnnnnnnnnnnnnnnnnnnnnnnnnnnnnnnnnnnnnnnnnnnnnnnnnnnnnnnnnnnnnnnnnnnnnnnnnnnnnnnnnnnnnnnnnnnnnnnnnnnnnnnnnnnnnnnnnnnnnnnnnnnnnnnnnnnnnnnnnnnnnnnnnnnnnnnnnnnnnnnnnnnnnnnnnnnnnnnnnnnnnnnnnnnnnnnnnnnnnnnnnnnnnnnnnnnnnnnnnnnnnnnnnnnnnnnnnnnnnnnnnnnnnnnnnnnnnnnnnnnnnnnnnnnnnnnnnnnnnnnnnnnnnnnnnnnnnnnnnnnnnnnnnnnnnnnnnnnnnnnnnnnnnnnnnnnnnnnnnnnnnnnnnnnnnnnnnnnnnnnnnnnnnnnnnnnnnnnnnnnnnnnnnnnnnnnnnnnnnnnnnnnnnnnnnnnnnnnnnnnnnnnnnnnnnnnnnnnnnnnnnnnnnnnnnnnnnnnnnnnnnnnnnnnnnnnnnnnnnnnnnnnnnnnnnnnnnnnnnnnnnnnnnnnnnnnnnnnnnnnnnnnnnnnnnnnnnnnnnnnnnnnnnnnnnnnnnnnnnnnnnnnnnnnnnnnnnnnnnnnnnnnnnnnnnnnnnnnnnnnnnnnnnnnnnnnnnnnnnnnnnnnnnnnnnnnnnnnnnnnnnnnnnnnnnnnnnnnnnnnnnnnnnnnnnnnnnnnnnnnnnnnnnnnnnnnnnnnnnnnnnnnnnnnnnnnnnnnnnnnnnnnnnnnnnnnnnnnnnnnnnnnnnnnnnnnnnnnnnnnnnnnnnnnnnnnnnnnnnnnnnnnnnnnnnnnnnnnnnnnnnnnnnnnnnnnnnnnnnnnnnnnnnnnnnnnnnnnnnnnnnnnnnnnnnnnnnnnnnnnnnnnnnnnnnnnnnnnnnnnnnnnnnnnnnnnnnnnnnnnnnnnnnnnnnnnnnnnnnnnnnnnnnnnnnnnnnnnnnnnnnnnnnnnnnnnnnnnnnnnnnnnnnnnnnnnnnnnnnnnnnnnnnnnnnnnnnnnnnnnnnnnnnnnnnnnnnnnnnnnnnnnnnnnnnnnnnnnnnnnnnnnnnnnnnnnnnnnnnnnnnnnnnnnnnnnnnnnnnnnnnnnnnnnnnnnnnnnnnnnnnnnnnnnnnnnnnnnnnnnnnnnnnnnnnnnnnnnnnnnnnnnnnnnnnnnnnnnnnnnnnnnnnnnnnnnnnnnnnnnnnnnnnnnnnnnnnnnnnnnnnnnnnnnnnnnnnnnnnnnnnnnnnnnnnnnnnnnnnnnnnnnnnnnnnnnnnnnnnnnnnnnnnnnnnnnnnnnnnnnnnnnnnnnnnnnnnnnnnnnnnnnnnnnnnnnnnnnnnnnnnnnnnnnnnnnnnnnnnnnnnnnnnnnnnnnnnnnnnnnnnnnnnnnnnnnnnnnnnnnnnnnnnnnnnnnnnnnnnnnnnnnnnnnnnnnnnnnnnnnnnnnnnnnnnnnnnnnnnnnnnnnnnnnnnnnnnnnnnnnnnnnnnnnnnnnnnnnnnnnnnnnnnnnnnnnnnnnnnnnnnnnnnnnnnnnnnnnnnnnnnnnnnnnnnnnnnnnnnnnnnnnnnnnnnnnnnnnnnnnnnnnnnnnnnnnnnnnnnnnnnnnnnnnnnnnnnnnnnnnnnnnnnnnnnnnnnnnnnnnnnnnnnnnnnnnnnnnnnnnnnnnnnnnnnnnnnnnnnnnnnnnnnnnnnnnnnnnnnnnnnnnnnnnnnnnnnnnnnnnnnnnnnnnnnnnnnnnnnnnnnnnnnnnnnnnnnnnnnnnnnnnnnnnnnnnnnnnnnnnnnnnnnnnnnnnnnnnnnnnnnnnnnnnnnnnnnnnnnnnnnnnnnnnnnnnnnnnnnnnnnnnnnnnnnnnnnnnnnnnnnnnnnnnnnnnnnnnnnnnnnnnnnnnnnnnnnnnnnnnnnnnnnnnnnnnnnnnnnnnnnnnnnnnnnnnnnnnnnnnnnnnnnnnnnnnnnnnnnnnnnnnnnnnnnnnnnnnnnnnnnnnnnnnnnnnnnnnnnnnnnnnnnnnnnnnnnnnnnnnnnnnnnnnnnnnnnnnnnnnnnnnnnnnnnnnnnnnnnnnnnnnnnnnnnnnnnnnnnnnnnnnnnnnnnnnnnnnnnnnnnnnnnnnnnnnnnnnnnnnnnnnnnnnnnnnnnnnnnnnnnnnnnnnnnnnnnnnnnnnnnnnnnnnnnnnnnnnnnnnnnnnnnnnnnnnnnnnnnnnnnnnnnnnnnnnnnnnnnnnnnnnnnnnnnnnnnnnnnnnnnnnnnnnnnnnnnnnnnnnnnnnnnnnnnnnnnnnnnnnnnnnnnnnnnnnnnnnnnnnnnnnnnnnnnnnnnnnnnnnnnnnnnnnnnnnnnnnnnnnnnnnnnnnnnnnnnnnnnnnnnnnnnnnnnnnnnnnnnnnnnnnnnnnnnnnnnnnnnnnnnnnnnnnnnnnnnnnnnnnnnnnnnnnnnnnnnnnnnnnnnnnnnnnnnnnnnnnnnnnnnnnnnnnnnnnnnnnnnnnnnnnnnnnnnnnnnnnnnnnnnnnnnnnnnnnnnnnnnnnnnnnnnnnnnnnnnnnnnnnnnnnnnnnnnnnnnnnnnnnnnnnnnnnnnnnnnnnnnnnnnnnnnnnnnnnnnnnnnnnnnnnnnnnnnnnnnnnnnnnnnnnnnnnnnnnnnnnnnnnnnnnnnnnnnnnnnnnnnnnnnnnnnnnnnnnnnnnnnnnnnnnnnnnnnnnnnnnnnnnnnnnnnnnnnnnnnnnnnnnnnnnnnnnnnnnnnnnnnnnnnnnnnnnnnnnnnnnnnnnnnnnnnnnnnnnnnnnnnnnnnnnnnnnnnnnnnnnnnnnnnnnnnnnnnnnnnnnnnnnnnnnnnnnnnnnnnnnnnnnnnnnnnnnnnnnnnnnnnnnnnnnnnnnnnnnnnnnnnnnnnnnnnnnnnnnnnnnnnnnnnnnnnnnnnnnnnnnnnnnnnnnnnnnnnnnnnnnnnnnnnnnnnnnnnnnnnnnnnnnnnnnnnnnnnnnnnnnnnnnnnnnnnnnnnnnnnnnnnnnnnnnnnnnnnnnnnnnnnnnnnnnnnnnnnnnnnnnnnnnnnnnnnnnnnnnnnnnnnnnnnnnnnnnnnnnnnnnnnnnnnnnnnnnnnnnnnnnnnnnnnnnnnnnnnnnnnnnnnnnnnnnnnnnnnnnnnnnnnnnnnnnnnnnnnnnnnnnnnnnnnnnnnnnnnnnnnnnnnnnnnnnnnnnnnnnnnnnnnnnnnnnnnnnnnnnnnnnnnnnnnnnnnnnnnnnnnnnnnnnnnnnnnnnnnnnnnnnnnnnnnnnnnnnnnnnnnnnnnnnnnnnnnnnnnnnnnnnnnnnnnnnnnnnnnnnnnnnnnnnnnnnnnnnnnnnnnnnnnnnnnnnnnnnnnnnnnnnnnnnnnnnnnnnnnnnnnnnnnnnnnnnnnnnnnnnnnnnnnnnnnnnnnnnnnnnnnnnnnnnnnnnnnnnnnnnnnnnnnnnnnnnnnnnnnnnnnnnnnnnnnnnnnnnnnnnnnnnnnnnnnnnnnnnnnnnnnnnnnnnnnnnnnnnnnnnnnnnnnnnnnnnnnnnnnnnnnnnnnnnnnnnnnnnnnnnnnnnnnnnnnnnnnnnnnnnnnnnnnnnnnnnnnnnnnnnnnnnnnnnnnnnnnnnnnnnnnnnnnnnnnnnnnnnnnnnnnnnnnnnnnnnnnnnnnnnnnnnnnnnnnnnnnnnnnnnnnnnnnnnnnnnnnnnnnnnnnnnnnnnnnnnnnnnnnnnnnnnnnnnnnnnnnnnnnnnnnnnnnnnnnnnnnnnnnnnnnnnnnnnnnnnnnnnnnnnnnnnnnnnnnnnnnnnnnnnnnnnnnnnnnnnnnnnnnnnnnnnnnnnnnnnnnnnnnnnnnnnnnnnnnnnnnnnnnnnnnnnnnnnnnnnnnnnnnnnnnnnnnnnnnnnnnnnnnnnnnnnnnnnnnnnnnnnnnnnnnnnnnnnnnnnnnnnnnnnnnnnnnnnnnnnnnnnnnnnnnnnnnnnnnnnnnnnnnnnnnnnnnnnnnnnnnnnnnnnnnnnnnnnnnnnnnnnnnnnnnnnnnnnnnnnnnnnnnnnnnnnnnnnnnnnnnnnnnnnnnnnnnnnnnnnnnnnnnnnnnnnnnnnnnnnnnnnnnnnnnnnnnnnnnnnnnnnnnnnnnnnnnnnnnnnnnnnnnnnnnnnnnnnnnnnnnnnnnnnnnnnnnnnnnnnnnnnnnnnnnnnnnnnnnnnnnnnnnnnnnnnnnnnnnnnnnnnnnnnnnnnnnnnnnnnnnnnnnnnnnnnnnnnnnnnnnnnnnnnnnnnnnnnnnnnnnnnnnnnnnnnnnnnnnnnnnnnnnnnnnnnnnnnnnnnnnnnnnnnnnnnnnnnnnnnnnnnnnnnnnnnnnnnnnnnnnnnnnnnnnnnnnnnnnnnnnnnnnnnnnnnnnnnnnnnnnnnnnnnnnnnnnnnnnnnnnnnnnnnnnnnnnnnnnnnnnnnnnnnnnnnnnnnnnnnnnnnnnnnnnnnnnnnnnnnnnnnnnnnnnnnnnnnnnnnnnnnnnnnnnnnnnnnnnnnnnnnnnnnnnnnnnnnnnnnnnnnnnnnnnnnnnnnnnnnnnnnnnnnnnnnnnnnnnnnnnnnnnnnnnnnnnnnnnnnnnnnnnnnnnnnnnnnnnnnnnnnnnnnnnnnnnnnnnnnnnnnnnnnnnnnnnnnnnnnnnnnnnnnnnnnnnnnnnnnnnnnnnnnnnnnnnnnnnnnnnnnnnnnnnnnnnnnnnnnnnnnnnnnnnnnnnnnnnnnnnnnnnnnnnnnnnnnnnnnnnnnnnnnnnnnnnnnnnnnnnnnnnnnnnnnnnnnnnnnnnnnnnnnnnnnnnnnnnnnnnnnnnnnnnnnnnnnnnnnnnnnnnnnnnnnnnnnnnnnnnnnnnnnnnnnnnnnnnnnnnnnnnnnnnnnnnnnnnnnnnnnnnnnnnnnnnnnnnnnnnnnnnnnnnnnnnnnnnnnnnnnnnnnnnnnnnnnnnnnnnnnnnnnnnnnnnnnnnnnnnnnnnnnnnnnnnnnnnnnnnnnnnnnnnnnnnnnnnnnnnnnnnnnnnnnnnnnnnnnnnnnnnnnnnnnnnnnnnnnnnnnnnnnnnnnnnnnnnnnnnnnnnnnnnnnnnnnnnnnnnnnnnnnnnnnnnnnnnnnnnnnnnnnnnnnnnnnnnnnnnnnnnnnnnnnnnnnnnnnnnnnnnnnnnnnnnnnnnnnnnnnnnnnnnnnnnnnnnnnnnnnnnnnnnnnnnnnnnnnnnnnnnnnnnnnnnnnnnnnnnnnnnnnnnnnnnnnnnnnnnnnnnnnnnnnnnnnnnnnnnnnnnnnnnnnnnnnnnnnnnnnnnnnnnnnnnnnnnnnnnnnnnnnnnnnnnnnnnnnnnnnnnnnnnnnnnnnnnnnnnnnnnnnnnnnnnnnnnnnnnnnnnnnnnnnnnnnnnnnnnnnnnnnnnnnnnnnnnnnnnnnnnnnnnnnnnnnnnnnnnnnnnnnnnnnnnnnnnnnnnnnnnnnnnnnnnnnnnnnnnnnnnnnnnnnnnnnnnnnnnnnnnnnnnnnnnnnnnnnnnnnnnnnnnnnnnnnnnnnnnnnnnnnnnnnnnnnnnnnnnnnnnnnnnnnnnnnnnnnnnnnnnnnnnnnnnnnnnnnnnnnnnnnnnnnnnnnnnnnnnnnnnnnnnnnnnnnnnnnnnnnnnnnnnnnnnnnnnnnnnnnnnnnnnnnnnnnnnnnnnnnnnnnnnnnnnnnnnnnnnnnnnnnnnnnnnnnnnnnnnnnnnnnnnnnnnnnnnnnnnnnnnnnnnnnnnnnnnnnnnnnnnnnnnnnnnnnnnnnnnnnnnnnnnnnnnnnnnnnnnnnnnnnnnnnnnnnnnnnnnnnnnnnnnnnnnnnnnnnnnnnnnnnnnnnnnnnnnnnnnnnnnnnnnnnnnnnnnnnnnnnnnnnnnnnnnnnnnnnnnnnnnnnnnnnnnnnnnnnnnnnnnnnnnnnnnnnnnnnnnnnnnnnnnnnnnnnnnnnnnnnnnnnnnnnnnnnnnnnnnnnnnnnnnnnnnnnnnnnnnnnnnnnnnnnnnnnnnnnnnnnnnnnnnnnnnnnnnnnnnnnnnnnnnnnnnnnnnnnnnnnnnnnnnnnnnnnnnnnnnnnnnnnnnnnnnnnnnnnnnnnnnnnnnnnnnnnnnnnnnnnnnnnnnnnnnnnnnnnnnnnnnnnnnnnnnnnnnnnnnnnnnnnnnnnnnnnnnnnnnnnnnnnnnnnnnnnnnnnnnnnnnnnnnnnnnnnnnnnnnnnnnnnnnnnnnnnnnnnnnnnnnnnnnnnnnnnnnnnnnnnnnnnnnnnnnnnnnnnnnnnnnnnnnnnnnnnnnnnnnnnnnnnnnnnnnnnnnnnnnnnnnnnnnnnnnnnnnnnnnnnnnnnnnnnnnnnnnnnnnnnnnnnnnnnnnnnnnnnnnnnnnnnnnnnnnnnnnnnnnnnnnnnnnnnnnnnnnnnnnnnnnnnnnnnnnnnnnnnnnnnnnnnnnnnnnnnnnnnnnnnnnnnnnnnnnnnnnnnnnnnnnnnnnnnnnnnnnnnnnnnnnnnnnnnnnnnnnnnnnnnnnnnnnnnnnnnnnnnnnnnnnnnnnnnnnnnnnnnnnnnnnnnnnnnnnnnnnnnnnnnnnnnnnnnnnnnnnnnnnnnnnnnnnnnnnnnnnnnnnnnnnnnnnnnnnnnnnnnnnnnnnnnnnnnnnnnnnnnnnnnnnnnnnnnnnnnnnnnnnnnnnnnnnnnnnnnnnnnnnnnnnnnnnnnnnnnnnnnnnnnnnnnnnnnnnnnnnnnnnnnnnnnnnnnnnnnnnnnnnnnnnnnnnnnnnnnnnnnnnnnnnnnnnnnnnnnnnnnnnnnnnnnnnnnnnnnnnnnnnnnnnnnnnnnnnnnnnnnnnnnnnnnnnnnnnnnnnnnnnnnnnnnnnnnnnnnnnnnnnnnnnnnnnnnnnnnnnnnnnnnnnnnnnnnnnnnnnnnnnnnnnnnnnnnnnnnnnnnnnnnnnnnnnnnnnnnnnnnnnnnnnnnnnnnnnnnnnnnnnnnnnnnnnnnnnnnnnnnnnnnnnnnnnnnnnnnnnnnnnnnnnnnnnnnnnnnnnnnnnnnnnnnnnnnnnnnnnnnnnnnnnnnnnnnnnnnnnnnnnnnnnnnnnnnnnnnnnnnnnnnnnnnnnnnnnnnnnnnnnnnnnnnnnnnnnnnnnnnnnnnnnnnnnnnnnnnnnnnnnnnnnnnnnnnnnnnnnnnnnnnnnnnnnnnnnnnnnnnnnnnnnnnnnnnnnnnnnnnnnnnnnnnnnnnnnnnnnnnnnnnnnnnnnnnnnnnnnnnnnnnnnnnnnnnnnnnnnnnnnnnnnnnnnnnnnnnnnnnnnnnnnnnnnnnnnnnnnnnnnnnnnnnnnnnnnnnnnnnnnnnnnnnnnnnnnnnnnnnnnnnnnnnnnnnnnnnnnnnnnnnnnnnnnnnnnnnnnnnnnnnnnnnnnnnnnnnnnnnnnnnnnnnnnnnnnnnnnnnnnnnnnnnnnnnnnnnnnnnnnnnnnnnnnnnnnnnnnnnnnnnnnnnnnnnnnnnnnnnnnnnnnnnnnnnnnnnnnnnnnnnnnnnnnnnnnnnnnnnnnnnnnnnnnnnnnnnnnnnnnnnnnnnnnnnnnnnnnnnnnnnnnnnnnnnnnnnnnnnnnnnnnnnnnnnnnnnnnnnnnnnnnnnnnnnnnnnnnnnnnnnnnnnnnnnnnnnnnnnnnnnnnnnnnnnnnnnnnnnnnnnnnnnnnnnnnnnnnnnnnnnnnnnnnnnnnnnnnnnnnnnnnnnnnnnnnnnnnnnnnnnnnnnnnnnnnnnnnnnnnnnnnnnnnnnnnnnnnnnnnnnnnnnnnnnnnnnnnnnnnnnnnnnnnnnnnnnnnnnnnnnnnnnnnnnnnnnnnnnnnnnnnnnnnnnnnnnnnnnnnnnnnnnnnnnnnnnnnnnnnnnnnnnnnnnnnnnnnnnnnnnnnnnnnnnnnnnnnnnnnnnnnnnnnnnnnnnnnnnnnnnnnnnnnnnnnnnnnnnnnnnnnnnnnnnnnnnnnnnnnnnnnnnnnnnnnnnnnnnnnnnnnnnnnnnnnnnnnnnnnnnnnnnnnnnnnnnnnnnnnnnnnnnnnnnnnnnnnnnnnnnnnnnnnnnnnnnnnnnnnnnnnnnnnnnnnnnnnnnnnnnnnnnnnnnnnnnnnnnnnnnnnnnnnnnnnnnnnnnnnnnnnnnnnnnnnnnnnnnnnnnnnnnnnnnnnnnnnnnnnnnnnnnnnnnnnnnnnnnnnnnnnnnnnnnnnnnnnnnnnnnnnnnnnnnnnnnnnnnnnnnnnnnnnnnnnnnnnnnnnnnnnnnnnnnnnnnnnnnnnnnnnnnnnnnnnnnnnnnnnnnnnnnnnnnnnnnnnnnnnnnnnnnnnnnnnnnnnnnnnnnnnnnnnnnnnnnnnnnnnnnnnnnnnnnnnnnnnnnnnnnnnnnnnnnnnnnnnnnnnnnnnnnnnnnnnnnnnnnnnnnnnnnnnnnnnnnnnnnnnnnnnnnnnnnnnnnnnnnnnnnnnnnnnnnnnnnnnnnnnnnnnnnnnnnnnnnnnnnnnnnnnnnnnnnnnnnnnnnnnnnnnnnnnnnnnnnnnnnnnnnnnnnnnnnnnnnnnnnnnnnnnnnnnnnnnnnnnnnnnnnnnnnnnnnnnnnnnnnnnnnnnnnnnnnnnnnnnnnnnnnnnnnnnnnnnnnnnnnnnnnnnnnnnnnnnnnnnnnnnnnnnnnnnnnnnnnnnnnnnnnnnnnnnnnnnnnnnnnnnnnnnnnnnnnnnnnnnnnnnnnnnnnnnnnnnnnnnnnnnnnnnnnnnnnnnnnnnnnnnnnnnnnnnnnnnnnnnnnnnnnnnnnnnnnnnnnnnnnnnnnnnnnnnnnnnnnnnnnnnnnnnnnnnnnnnnnnnnnnnnnnnnnnnnnnnnnnnnnnnnnnnnnnnnnnnnnnnnnnnnnnnnnnnnnnnnnnnnnnnnnnnnnnnnnnnnnnnnnnnnnnnnnnnnnnnnnnnnnnnnnnnnnnnnnnnnnnnnnnnnnnnnnnnnnnnnnnnnnnnnnnnnnnnnnnnnnnnnnnnnnnnnnnnnnnnnnnnnnnnnnnnnnnnnnnnnnnnnnnnnnnnnnnnnnnnnnnnnnnnnnnnnnnnnnnnnnnnnnnnnnnnnnnnnnnnnnnnnnnnnnnnnnnnnnnnnnnnnnnnnnnnnnnnnnnnnnnnnnnnnnnnnnnnnnnnnnnnnnnnnnnnnnnnnnnnnnnnnnnnnnnnnnnnnnnnnnnnnnnnnnnnnnnnnnnnnnnnnnnnnnnnnnnnnnnnnnnnnnnnnnnnnnnnnnnnnnnnnnnnnnnnnnnnnnnnnnnnnnnnnnnnnnnnnnnnnnnnnnnnnnnnnnnnnnnnnnnnnnnnnnnnnnnnnnnnnnnnnnnnnnnnnnnnnnnnnnnnnnnnnnnnnnnnnnnnnnnnnnnnnnnnnnnnnnnnnnnnnnnnnnnnnnnnnnnnnnnnnnnnnnnnnnnnnnnnnnnnnnnnnnnnnnnnnnnnnnnnnnnnnnnnnnnnnnnnnnnnnnnnnnnnnnnnnnnnnnnnnnnnnnnnnnnnnnnnnnnnnnnnnnnnnnnnnnnnnnnnnnnnnnnnnnnnnnnnnnnnnnnnnnnnnnnnnnnnnnnnnnnnnnnnnnnnnnnnnnnnnnnnnnnnnnnnnnnnnnnnnnnnnnnnnnnnnnnnnnnnnnnnnnnnnnnnnnnnnnnnnnnnnnnnnnnnnnnnnnnnnnnnnnnnnnnnnnnnnnnnnnnnnnnnnnnnnnnnnnnnnnnnnnnnnnnnnnnnnnnnnnnnnnnnnnnnnnnnnnnnnnnnnnnnnnnnnnnnnnnnnnnnnnnnnnnnnnnnnnnnnnnnnnnnnnnnnnnnnnnnnnnnnnnnnnnnnnnnnnnnnnnnnnnnnnnnnnnnnnnnnnnnnnnnnnnnnnnnnnnnnnnnnnnnnnnnnnnnnnnnnnnnnnnnnnnnnnnnnnnnnnnnnnnnnnnnnnnnnnnnnnnnnnnnnnnnnnnnnnnnnnnnnnnnnnnnnnnnnnnnnnnnnnnnnnnnnnnnnnnnnnnnnnnnnnnnnnnnnnnnnnnnnnnnnnnnnnnnnnnnnnnnnnnnnnnnnnnnnnnnnnnnnnnnnnnnnnnnnnnnnnnnnnnnnnnnnnnnnnnnnnnnnnnnnnnnnnnnnnnnnnnnnnnnnnnnnnnnnnnnnnnnnnnnnnnnnnnnnnnnnnnnnnnnnnnnnnnnnnnnnnnnnnnnnnnnnnnnnnnnnnnnnnnnnnnnnnnnnnnnnnnnnnnnnnnnnnnnnnnnnnnnnnnnnnnnnnnnnnnnnnnnnnnnnnnnnnnnnnnnnnnnnnnnnnnnnnnnnnnnnnnnnnnnnnnnnnnnnnnnnnnnnnnnnnnnnnnnnnnnnnnnnnnnnnnnnnnnnnnnnnnnnnnnnnnnnnnnnnnnnnnnnnnnnnnnnnnnnnnnnnnnnnnnnnnnnnnnnnnnnnnnnnnnnnnnnnnnnnnnnnnnnnnnnnnnnnnnnnnnnnnnnnnnnnnnnnnnnnnnnnnnnnnnnnnnnnnnnnnnnnnnnnnnnnnnnnnnnnnnnnnnnnnnnnnnnnnnnnnnnnnnnnnnnnnnnnnnnnnnnnnnnnnnnnnnnnnnnnnnnnnnnnnnnnnnnnnnnnnnnnnnnnnnnnnnnnnnnnnnnnnnnnnnnnnnnnnnnnnnnnnnnnnnnnnnnnnnnnnnnnnnnnnnnnnnnnnnnnnnnnnnnnnnnnnnnnnnnnnnnnnnnnnnnnnnnnnnnnnnnnnnnnnnnnnnnnnnnnnnnnnnnnnnnnnnnnnnnnnnnnnnnnnnnnnnnnnnnnnnnnnnnnnnnnnnnnnnnnnnnnnnnnnnnnnnnnnnnnnnnnnnnnnnnnnnnnnnnnnnnnnnnnnnnnnnnnnnnnnnnnnnnnnnnnnnnnnnnnnnnnnnnnnnnnnnnnnnnnnnnnnnnnnnnnnnnnnnnnnnnnnnnnnnnnnnnnnnnnnnnnnnnnnnnnnnnnnnnnnnnnnnnnnnnnnnnnnnnnnnnnnnnnnnnnnnnnnnnnnnnnnnnnnnnnnnnnnnnnnnnnnnnnnnnnnnnnnnnnnnnnnnnnnnnnnnnnnnnnnnnnnnnnnnnnnnnnnnnnnnnnnnnnnnnnnnnnnnnnnnnnnnnnnnnnnnnnnnnnnnnnnnnnnnnnnnnnnnnnnnnnnnnnnnnnnnnnnnnnnnnnnnnnnnnnnnnnnnnnnnnnnnnnnnnnnnnnnnnnnnnnnnnnnnnnnnnnnnnnnnnnnnnnnnnnnnnnnnnnnnnnnnnnnnnnnnnnnnnnnnnnnnnnnnnnnnnnnnnnnnnnnnnnnnnnnnnnnnnnnnnnnnnnnnnnnnnnnnnnnnnnnnnnnnnnnnnnnnnnnnnnnnnnnnnnnnnnnnnnnnnnnnnnnnnnnnnnnnnnnnnnnnnnnnnnnnnnnnnnnnnnnnnnnnnnnnnnnnnnnnnnnnnnnnnnnnnnnnnnnnnnnnnnnnnnnnnnnnnnnnnnnnnnnnnnnnnnnnnnnnnnnnnnnnnnnnnnnnnnnnnnnnnnnnnnnnnnnnnnnnnnnnnnnnnnnnnnnnnnnnnnnnnnnnnnnnnnnnnnnnnnnnnnnnnnnnnnnnnnnnnnnnnnnnnnnnnnnnnnnnnnnnnnnnnnnnnnnnnnnnnnnnnnnnnnnnnnnnnnnnnnnnnnnnnnnnnnnnnnnnnnnnnnnnnnnnnnnnnnnnnnnnnnnnnnnnnnnnnnnnnnnnnnnnnnnnnnnnnnnnnnnnnnnnnnnnnnnnnnnnnnnnnnnnnnnnnnnnnnnnnnnnnnnnnnnnnnnnnnnnnnnnnnnnnnnnnnnnnnnnnnnnnnnnnnnnnnnnnnnnnnnnnnnnnnnnnnnnnnnnnnnnnnnnnnnnnnnnnnnnnnnnnnnnnnnnnnnnnnnnnnnnnnnnnnnnnnnnnnnnnnnnnnnnnnnnnnnnnnnnnnnnnnnnnnnnnnnnnnnnnnnnnnnnnnnnnnnnnnnnnnnnnnnnnnnnnnnnnnnnnnnnnnnnnnnnnnnnnnnnnnnnnnnnnnnnnnnnnnnnnnnnnnnnnnnnnnnnnnnnnnnnnnnnnnnnnnnnnnnnnnnnnnnnnnnnnnnnnnnnnnnnnnnnnnnnnnnnnnnnnnnnnnnnnnnnnnnnnnnnnnnnnnnnnnnnnnnnnnnnnnnnnnnnnnnnnnnnnnnnnnnnnnnnnnnnnnnnnnnnnnnnnnnnnnnnnnnnnnnnnnnnnnnnnnnnnnnnnnnnnnnnnnnnnnnnnnnnnnnnnnnnnnnnnnnnnnnnnnnnnnnnnnnnnnnnnnnnnnnnnnnnnnnnnnnnnnnnnnnnnnnnnnnnnnnnnnnnnnnnnnnnnnnnnnnnnnnnnnnnnnnnnnnnnnnnnnnnnnnnnnnnnnnnnnnnnnnnnnnnnnnnnnnnnnnnnnnnnnnnnnnnnnnnnnnnnnnnnnnnnnnnnnnnnnnnnnnnnnnnnnnnnnnnnnnnnnnnnnnnnnnnnnnnnnnnnnnnnnnnnnnnnnnnnnnnnnnnnnnnnnnnnnnnnnnnnnnnnnnnnnnnnnnnnnnnnnnnnnnnnnnnnnnnnnnnnnnnnnnnnnnnnnnnnnnnnnnnnnnnnnnnnnnnnnnnnnnnnnnnnnnnnnnnnnnnnnnnnnnnnnnnnnnnnnnnnnnnnnnnnnnnnnnnnnnnnnnnnnnnnnnnnnnnnnnnnnnnnnnnnnnnnnnnnnnnnnnnnnnnnnnnnnnnnnnnnnnnnnnnnnnnnnnnnnnnnnnnnnnnnnnnnnnnnnnnnnnnnnnnnnnnnnnnnnnnnnnnnnnnnnnnnnnnnnnnnnnnnnnnnnnnnnnnnnnnnnnnnnnnnnnnnnnnnnnnnnnnnnnnnnnnnnnnnnnnnnnnnnnnnnnnnnnnnnnnnnnnnnnnnnnnnnnnnnnnnnnnnnnnnnnnnnnnnnnnnnnnnnnnnnnnnnnnnnnnnnnnnnnnnnnnnnnnnnnnnnnnnnnnnnnnnnnnnnnnnnnnnnnnnnnnnnnnnnnnnnnnnnnnnnnnnnnnnnnnnnnnnnnnnnnnnnnnnnnnnnnnnnnnnnnnnnnnnnnnnnnnnnnnnnnnnnnnnnnnnnnnnnnnnnnnnnnnnnnnnnnnnnnnnnnnnnnnnnnnnnnnnnnnnnnnnnnnnnnnnnnnnnnnnnnnnnnnnnnnnnnnnnnnnnnnnnnnnnnnnnnnnnnnnnnnnnnnnnnnnnnnnnnnnnnnnnnnnnnnnnnnnnnnnnnnnnnnnnnnnnnnnnnnnnnnnnnnnnnnnnnnnnnnnnnnnnnnnnnnnnnnnnnnnnnnnnnnnnnnnnnnnnnnnnnnnnnnnnnnnnnnnnnnnnnnnnnnnnnnnnnnnnnnnnnnnnnnnnnnnnnnnnnnnnnnnnnnnnnnnnnnnnnnnnnnnnnnnnnnnnnnnnnnnnnnnnnnnnnnnnnnnnnnnnnnnnnnnnnnnnnnnnnnnnnnnnnnnnnnnnnnnnnnnnnnnnnnnnnnnnnnnnnnnnnnnnnnnnnnnnnnnnnnnnnnnnnnnnnnnnnnnnnnnnnnnnnnnnnnnnnnnnnnnnnnnnnnnnnnnnnnnnnnnnnnnnnnnnnnnnnnnnnnnnnnnnnnnnnnnnnnnnnnnnnnnnnnnnnnnnnnnnnnnnnnnnnnnnnnnnnnnnnnnnnnnnnnnnnnnnnnnnnnnnnnnnnnnnnnnnnnnnnnnnnnnnnnnnnnnnnnnnnnnnnnnnnnnnnnnnnnnnnnnnnnnnnnnnnnnnnnnnnnnnnnnnnnnnnnnnnnnnnnnnnnnnnnnnnnnnnnnnnnnnnnnnnnnnnnnnnnnnnnnnnnnnnnnnnnnnnnnnnnnnnnnnnnnnnnnnnnnnnnnnnnnnnnnnnnnnnnnnnnnnnnnnnnnnnnnnnnnnnnnnnnnnnnnnnnnnnnnnnnnnnnnnnnnnnnnnnnnnnnnnnnnnnnnnnnnnnnnnnnnnnnnnnnnnnnnnnnnnnnnnnnnnnnnnnnnnnnnnnnnnnnnnnnnnnnnnnnnnnnnnnnnnnnnnnnnnnnnnnnnnnnnnnnnnnnnnnnnnnnnnnnnnnnnnnnnnnnnnnnnnnnnnnnnnnnnnnnnnnnnnnnnnnnnnnnnnnnnnnnnnnnnnnnnnnnnnnnnnnnnnnnnnnnnnnnnnnnnnnnnnnnnnnnnnnnnnnnnnnnnnnnnnnnnnnnnnnnnnnnnnnnnnnnnnnnnnnnnnnnnnnnnnnnnnnnnnnnnnnnnnnnnnnnnnnnnnnnnnnnnnnnnnnnnnnnnnnnnnnnnnnnnnnnnnnnnnnnnnnnnnnnnnnnnnnnnnnnnnnnnnnnnnnnnnnnnnnnnnnnnnnnnnnnnnnnnnnnnnnnnnnnnnnnnnnnnnnnnnnnnnnnnnnnnnnnnnnnnnnnnnnnnnnnnnnnnnnnnnnnnnnnnnnnnnnnnnnnnnnnnnnnnnnnnnnnnnnnnnnnnnnnnnnnnnnnnnnnnnnnnnnnnnnnnnnnnnnnnnnnnnnnnnnnnnnnnnnnnnnnnnnnnnnnnnnnnnnnnnnnnnnnnnnnnnnnnnnnnnnnnnnnnnnnnnnnnnnnnnnnnnnnnnnnnnnnnnnnnnnnnnnnnnnnnnnnnnnnnnnnnnnnnnnnnnnnnnnnnnnnnnnnnnnnnnnnnnnnnnnnnnnnnnnnnnnnnnnnnnnnnnnnnnnnnnnnnnnnnnnnnnnnnnnnnnnnnnnnnnnnnnnnnnnnnnnnnnnnnnnnnnnnnnnnnnnnnnnnnnnnnnnnnnnnnnnnnnnnnnnnnnnnnnnnnnnnnnnnnnnnnnnnnnnnnnnnnnnnnnnnnnnnnnnnnnnnnnnnnnnnnnnnnnnnnnnnnnnnnnnnnnnnnnnnnnnnnnnnnnnnnnnnnnnnnnnnnnnnnnnnnnnnnnnnnnnnnnnnnnnnnnnnnnnnnnnnnnnnnnnnnnnnnnnnnnnnnnnnnnnnnnnnnnnnnnnnnnnnnnnnnnnnnnnnnnnnnnnnnnnnnnnnnnnnnnnnnnnnnnnnnnnnnnnnnnnnnnnnnnnnnnnnnnnnnnnnnnnnnnnnnnnnnnnnnnnnnnnnnnnnnnnnnnnnnnnnnnnnnnnnnnnnnnnnnnnnnnnnnnnnnnnnnnnnnnnnnnnnnnnnnnnnnnnnnnnnnnnnnnnnnnnnnnnnnnnnnnnnnnnnnnnnnnnnnnnnnnnnnnnnnnnnnnnnnnnnnnnnnnnnnnnnnnnnnnnnnnnnnnnnnnnnnnnnnnnnnnnnnnnnnnnnnnnnnnnnnnnnnnnnnnnnnnnnnnnnnnnnnnnnnnnnnnnnnnnnnnnnnnnnnnnnnnnnnnnnnnnnnnnnnnnnnnnnnnnnnnnnnnnnnnnnnnnnnnnnnnnnnnnnnnnnnnnnnnnnnnnnnnnnnnnnnnnnnnnnnnnnnnnnnnnnnnnnnnnnnnnnnnnnnnnnnnnnnnnnnnnnnnnnnnnnnnnnnnnnnnnnnnnnnnnnnnnnnnnnnnnnnnnnnnnnnnnnnnnnnnnnnnnnnnnnnnnnnnnnnnnnnnnnnnnnnnnnnnnnnnnnnnnnnnnnnnnnnnnnnnnnnnnnnnnnnnnnnnnnnnnnnnnnnnnnnnnnnnnnnnnnnnnnnnnnnnnnnnnnnnnnnnnnnnnnnnnnnnnnnnnnnnnnnnnnnnnnnnnnnnnnnnnnnnnnnnnnnnnnnnnnnnnnnnnnnnnnnnnnnnnnnnnnnnnnnnnnnnnnnnnnnnnnnnnnnnnnnnnnnnnnnnnnnnnnnnnnnnnnnnnnnnnnnnnnnnnnnnnnnnnnnnnnnnnnnnnnnnnnnnnnnnnnnnnnnnnnnnnnnnnnnnnnnnnnnnnnnnnnnnnnnnnnnnnnnnnnnnnnnnnnnnnnnnnnnnnnnnnnnnnnnnnnnnnnnnnnnnnnnnnnnnnnnnnnnnnnnnnnnnnnnnnnnnnnnnnnnnnnnnnnnnnnnnnnnnnnnnnnnnnnnnnnnnnnnnnnnnnnnnnnnnnnnnnnnnnnnnnnnnnnnnnnnnnnnnnnnnnnnnnnnnnnnnnnnnnnnnnnnnnnnnnnnnnnnnnnnnnnnnnnnnnnnnnnnnnnnnnnnnnnnnnnnnnnnnnnnnnnnnnnnnnnnnnnnnnnnnnnnnnnnnnnnnnnnnnnnnnnnnnnnnnnnnnnnnnnnnnnnnnnnnnnnnnnnnnnnnnnnnnnnnnnnnnnnnnnnnnnnnnnnnnnnnnnnnnnnnnnnnnnnnnnnnnnnnnnnnnnnnnnnnnnnnnnnnnnnnnnnnnnnnnnnnnnnnnnnnnnnnnnnnnnnnnnnnnnnnnnnnnnnnnnnnnnnnnnnnnnnnnnnnnnnnnnnnnnnnnnnnnnnnnnnnnnnnnnnnnnnnnnnnnnnnnnnnnnnnnnnnnnnnnnnnnnnnnnnnnnnnnnnnnnnnnnnnnnnnnnnnnnnnnnnnnnnnnnnnnnnnnnnnnnnnnnnnnnnnnnnnnnnnnnnnnnnnnnnnnnnnnnnnnnnnnnnnnnnnnnnnnnnnnnnnnnnnnnnnnnnnnnnnnnnnnnnnnnnnnnnnnnnnnnnnnnnnnnnnnnnnnnnnnnnnnnnnnnnnnnnnnnnnnnnnnnnnnnnnnnnnnnnnnnnnnnnnnnnnnnnnnnnnnnnnnnnnnnnnnnnnnnnnnnnnnnnnnnnnnnnnnnnnnnnnnnnnnnnnnnnnnnnnnnnnnnnnnnnnnnnnnnnnnnnnnnnnnnnnnnnnnnnnnnnnnnnnnnnnnnnnnnnnnnnnnnnnnnnnnnnnnnnnnnnnnnnnnnnnnnnnnnnnnnnnnnnnnnnnnnnnnnnnnnnnnnnnnnnnnnnnnnnnnnnnnnnnnnnnnnnnnnnnnnnnnnnnnnnnnnnnnnnnnnnnnnnnnnnnnnnnnnnnnnnnnnnnnnnnnnnnnnnnnnnnnnnnnnnnnnnnnnnnnnnnnnnnnnnnnnnnnnnnnnnnnnnnnnnnnnnnnnnnnnnnnnnnnnnnnnnnnnnnnnnnnnnnnnnnnnnnnnnnnnnnnnnnnnnnnnnnnnnnnnnnnnnnnnnnnnnnnnnnnnnnnnnnnnnnnnnnnnnnnnnnnnnnnnnnnnnnnnnnnnnnnnnnnnnnnnnnnnnnnnnnnnnnnnnnnnnnnnnnnnnnnnnnnnnnnnnnnnnnnnnnnnnnnnnnnnnnnnnnnnnnnnnnnnnnnnnnnnnnnnnnnnnnnnnnnnnnnnnnnnnnnnnnnnnnnnnnnnnnnnnnnnnnnnnnnnnnnnnnnnnnnnnnnnnnnnnnnnnnnnnnnnnnnnnnnnnnnnnnnnnnnnnnnnnnnnnnnnnnnnnnnnnnnnnnnnnnnnnnnnnnnnnnnnnnnnnnnnnnnnnnnnnnnnnnnnnnnnnnnnnnnnnnnnnnnnnnnnnnnnnnnnnnnnnnnnnnnnnnnnnnnnnnnnnnnnnnnnnnnnnnnnnnnnnnnnnnnnnnnnnnnnnnnnnnnnnnnnnnnnnnnnnnnnnnnnnnnnnnnnnnnnnnnnnnnnnnnnnnnnnnnnnnnnnnnnnnnnnnnnnnnnnnnnnnnnnnnnnnnnnnnnnnnnnnnnnnnnnnnnnnnnnnnnnnnnnnnnnnnnnnnnnnnnnnnnnnnnnnnnnnnnnnnnnnnnnnnnnnnnnnnnnnnnnnnnnnnnnnnnnnnnnnnnnnnnnnnnnnnnnnnnnnnnnnnnnnnnnnnnnnnnnnnnnnnnnnnnnnnnnnnnnnnnnnnnnnnnnnnnnnnnnnnnnnnnnnnnnnnnnnnnnnnnnnnnnnnnnnnnnnnnnnnnnnnnnnnnnnnnnnnnnnnnnnnnnnnnnnnnnnnnnnnnnnnnnnnnnnnnnnnnnnnnnnnnnnnnnnnnnnnnnnnnnnnnnnnnnnnnnnnnnnnnnnnnnnnnnnnnnnnnnnnnnnnnnnnnnnnnnnnnnnnnnnnnnnnnnnnnnnnnnnnnnnnnnnnnnnnnnnnnnnnnnnnnnnnnnnnnnnnnnnnnnnnnnnnnnnnnnnnnnnnnnnnnnnnnnnnnnnnnnnnnnnnnnnnnnnnnnnnnnnnnnnnnnnnnnnnnnnnnnnnnnnnnnnnnnnnnnnnnnnnnnnnnnnnnnnnnnnnnnnnnnnnnnnnnnnnnnnnnnnnnnnnnnnnnnnnnnnnnnnnnnnnnnnnnnnnnnnnnnnnnnnnnnnnnnnnnnnnnnnnnnnnnnnnnnnnnnnnnnnnnnnnnnnnnnnnnnnnnnnnnnnnnnnnnnnnnnnnnnnnnnnnnnnnnnnnnnnnnnnnnnnnnnnnnnnnnnnnnnnnnnnnnnnnnnnnnnnnnnnnnnnnnnnnnnnnnnnnnnnnnnnnnnnnnnnnnnnnnnnnnnnnnnnnnnnnnnnnnnnnnnnnnnnnnnnnnnnnnnnnnnnnnnnnnnnnnnnnnnnnnnnnnnnnnnnnnnnnnnnnnnnnnnnnnnnnnnnnnnnnnnnnnnnnnnnnnnnnnnnnnnnnnnnnnnnnnnnnnnnnnnnnnnnnnnnnnnnnnnnnnnnnnnnnnnnnnnnnnnnnnnnnnnnnnnnnnnnnnnnnnnnnnnnnnnnnnnnnnnnnnnnnnnnnnnnnnnnnnnnnnnnnnnnnnnnnnnnnnnnnnnnnnnnnnnnnnnnnnnnnnnnnnnnnnnnnnnnnnnnnnnnnnnnnnnnnnnnnnnnnnnnnnnnnnnnnnnnnnnnnnnnnnnnnnnnnnnnnnnnnnnnnnnnnnnnnnnnnnnnnnnnnnnnnnnnnnnnnnnnnnnnnnnnnnnnnnnnnnnnnnnnnnnnnnnnnnnnnnnnnnnnnnnnnnnnnnnnnnnnnnnnnnnnnnnnnnnnnnnnnnnnnnnnnnnnnnnnnnnnnnnnnnnnnnnnnnnnnnnnnnnnnnnnnnnnnnnnnnnnnnnnnnnnnnnnnnnnnnnnnnnnnnnnnnnnnnnnnnnnnnnnnnnnnnnnnnnnnnnnnnnnnnnnnnnnnnnnnnnnnnnnnnnnnnnnnnnnnnnnnnnnnnnnnnnnnnnnnnnnnnnnnnnnnnnnnnnnnnnnnnnnnnnnnnnnnnnnnnnnnnnnnnnnnnnnnnnnnnnnnnnnnnnnnnnnnnnnnnnnnnnnnnnnnnnnnnnnnnnnnnnnnnnnnnnnnnnnnnnnnnnnnnnnnnnnnnnnnnnnnnnnnnnnnnnnnnnnnnnnnnnnnnnnnnnnnnnnnnnnnnnnnnnnnnnnnnnnnnnnnnnnnnnnnnnnnnnnnnnnnnnnnnnnnnnnnnnnnnnnnnnnnnnnnnnnnnnnnnnnnnnnnnnnnnnnnnnnnnnnnnnnnnnnnnnnnnnnnnnnnnnnnnnnnnnnnnnnnnnnnnnnnnnnnnnnnnnnnnnnnnnnnnnnnnnnnnnnnnnnnnnnnnnnnnnnnnnnnnnnnnnnnnnnnnnnnnnnnnnnnnnnnnnnnnnnnnnnnnnnnnnnnnnnnnnnnnnnnnnnnnnnnnnnnnnnnnnnnnnnnnnnnnnnnnnnnnnnnnnnnnnnnnnnnnnnnnnnnnnnnnnnnnnnnnnnnnnnnnnnnnnnnnnnnnnnnnnnnnnnnnnnnnnnnnnnnnnnnnnnnnnnnnnnnnnnnnnnnnnnnnnnnnnnnnnnnnnnnnnnnnnnnnnnnnnnnnnnnnnnnnnnnnnnnnnnnnnnnnnnnnnnnnnnnnnnnnnnnnnnnnnnnnnnnnnnnnnnnnnnnnnnnnnnnnnnnnnnnnnnnnnnnnnnnnnnnnnnnnnnnnnnnnnnnnnnnnnnnnnnnnnnnnnnnnnnnnnnnnnnnnnnnnnnnnnnnnnnnnnnnnnnnnnnnnnnnnnnnnnnnnnnnnnnnnnnnnnnnnnnnnnnnnnnnnnnnnnnnnnnnnnnnnnnnnnnnnnnnnnnnnnnnnnnnnnnnnnnnnnnnnnnnnnnnnnnnnnnnnnnnnnnnnnnnnnnnnnnnnnnnnnnnnnnnnnnnnnnnnnnnnnnnnnnnnnnnnnnnnnnnnnnnnnnnnnnnnnnnnnnnnnnnnnnnnnnnnnnnnnnnnnnnnnnnnnnnnnnnnnnnnnnnnnnnnnnnnnnnnnnnnnnnnnnnnnnnnnnnnnnnnnnnnnnnnnnnnnnnnnnnnnnnnnnnnnnnnnnnnnnnnnnnnnnnnnnnnnnnnnnnnnnnnnnnnnnnnnnnnnnnnnnnnnnnnnnnnnnnnnnnnnnnnnnnnnnnnnnnnnnnnnnnnnnnnnnnnnnnnnnnnnnnnnnnnnnnnnnnnnnnnnnnnnnnnnnnnnnnnnnnnnnnnnnnnnnnnnnnnnnnnnnnnnnnnnnnnnnnnnnnnnnnnnnnnnnnnnnnnnnnnnnnnnnnnnnnnnnnnnnnnnnnnnnnnnnnnnnnnnnnnnnnnnnnnnnnnnnnnnnnnnnnnnnnnnnnnnnnnnnnnnnnnnnnnnnnnnnnnnnnnnnnnnnnnnnnnnnnnnnnnnnnnnnnnnnnnnnnnnnnnnnnnnnnnnnnnnnnnnnnnnnnnnnnnnnnnnnnnnnnnnnnnnnnnnnnnnnnnnnnnnnnnnnnnnnnnnnnnnnnnnnnnnnnnnnnnnnnnnnnnnnnnnnnnnnnnnnnnnnnnnnnnnnnnnnnnnnnnnnnnnnnnnnnnnnnnnnnnnnnnnnnnnnnnnnnnnnnnnnnnnnnnnnnnnnnnnnnnnnnnnnnnnnnnnnnnnnnnnnnnnnnnnnnnnnnnnnnnnnnnnnnnnnnnnnnnnnnnnnnnnnnnnnnnnnnnnnnnnnnnnnnnnnnnnnnnnnnnnnnnnnnnnnnnnnnnnnnnnnnnnnnnnnnnnnnnnnnnnnnnnnnnnnnnnnnnnnnnnnnnnnnnnnnnnnnnnnnnnnnnnnnnnnnnnnnnnnnnnnnnnnnnnnnnnnnnnnnnnnnnnnnnnnnnnnnnnnnnnnnnnnnnnnnnnnnnnnnnnnnnnnnnnnnnnnnnnnnnnnnnnnnnnnnnnnnnnnnnnnnnnnnnnnnnnnnnnnnnnnnnnnnnnnnnnnnnnnnnnnnnnnnnnnnnnnnnnnnnnnnnnnnnnnnnnnnnnnnnnnnnnnnnnnnnnnnnnnnnnnnnnnnnnnnnnnnnnnnnnnnnnnnnnnnnnnnnnnnnnnnnnnnnnnnnnnnnnnnnnnnnnnnnnnnnnnnnnnnnnnnnnnnnnnnnnnnnnnnnnnnnnnnnnnnnnnnnnnnnnnnnnnnnnnnnnnnnnnnnnnnnnnnnnnnnnnnnnnnnnnnnnnnnnnnnnnnnnnnnnnnnnnnnnnnnnnnnnnnnnnnnnnnnnnnnnnnnnnnnnnnnnnnnnnnnnnnnnnnnnnnnnnnnnnnnnnnnnnnnnnnnnnnnnnnnnnnnnnnnnnnnnnnnnnnnnnnnnnnnnnnnnnnnnnnnnnnnnnnnnnnnnnnnnnnnnnnnnnnnnnnnnnnnnnnnnnnnnnnnnnnnnnnnnnnnnnnnnnnnnnnnnnnnnnnnnnnnnnnnnnnnnnnnnnnnnnnnnnnnnnnnnnnnnnnnnnnnnnnnnnnnnnnnnnnnnnnnnnnnnnnnnnnnnnnnnnnnnnnnnnnnnnnnnnnnnnnnnnnnnnnnnnnnnnnnnnnnnnnnnnnnnnnnnnnnnnnnnnnnnnnnnnnnnnnnnnnnnnnnnnnnnnnnnnnnnnnnnnnnnnnnnnnnnnnnnnnnnnnnnnnnnnnnnnnnnnnnnnnnnnnnnnnnnnnnnnnnnnnnnnnnnnnnnnnnnnnnnnnnnnnnnnnnnnnnnnnnnnnnnnnnnnnnnnnnnnnnnnnnnnnnnnnnnnnnnnnnnnnnnnnnnnnnnnnnnnnnnnnnnnnnnnnnnnnnnnnnnnnnnnnnnnnnnnnnnnnnnnnnnnnnnnnnnnnnnnnnnnnnnnnnnnnnnnnnnnnnnnnnnnnnnnnnnnnnnnnnnnnnnnnnnnnnnnnnnnnnnnnnnnnnnnnnnnnnnnnnnnnnnnnnnnnnnnnnnnnnnnnnnnnnnnnnnnnnnnnnnnnnnnnnnnnnnnnnnnnnnnnnnnnnnnnnnnnnnnnnnnnnnnnnnnnnnnnnnnnnnnnnnnnnnnnnnnnnnnnnnnnnnnnnnnnnnnnnnnnnnnnnnnnnnnnnnnnnnnnnnnnnnnnnnnnnnnnnnnnnnnnnnnnnnnnnnnnnnnnnnnnnnnnnnnnnnnnnnnnnnnnnnnnnnnnnnnnnnnnnnnnnnnnnnnnnnnnnnnnnnnnnnnnnnnnnnnnnnnnnnnnnnnnnnnnnnnnnnnnnnnnnnnnnnnnnnnnnnnnnnnnnnnnnnnnnnnnnnnnnnnnnnnnnnnnnnnnnnnnnnnnnnnnnnnnnnnnnnnnnnnnnnnnnnnnnnnnnnnnnnnnnnnnnnnnnnnnnnnnnnnnnnnnnnnnnnnnnnnnnnnnnnnnnnnnnnnnnnnnnnnnnnnnnnnnnnnnnnnnnnnnnnnnnnnnnnnnnnnnnnnnnnnnnnnnnnnnnnnnnnnnnnnnnnnnnnnnnnnnnnnnnnnnnnnnnnnnnnnnnnnnnnnnnnnnnnnnnnnnnnnnnnnnnnnnnnnnnnnnnnnnnnnnnnnnnnnnnnnnnnnnnnnnnnnnnnnnnnnnnnnnnnnnnnnnnnnnnnnnnnnnnnnnnnnnnnnnnnnnnnnnnnnnnnnnnnnnnnnnnnnnnnnnnnnnnnnnnnnnnnnnnnnnnnnnnnnnnnnnnnnnnnnnnnnnnnnnnnnnnnnnnnnnnnnnnnnnnnnnnnnnnnnnnnnnnnnnnnnnnnnnnnnnnnnnnnnnnnnnnnnnnnnnnnnnnnnnnnnnnnnnnnnnnnnnnnnnnnnnnnnnnnnnnnnnnnnnnnnnnnnnnnnnnnnnnnnnnnnnnnnnnnnnnnnnnnnnnnnnnnnnnnnnnnnnnnnnnnnnnnnnnnnnnnnnnnnnnnnnnnnnnnnnnnnnnnnnnnnnnnnnnnnnnnnnnnnnnnnnnnnnnnnnnnnnnnnnnnnnnnnnnnnnnnnnnnnnnnnnnnnnnnnnnnnnnnnnnnnnnnnnnnnnnnnnnnnnnnnnnnnnnnnnnnnnnnnnnnnnnnnnnnnnnnnnnnnnnnnnnnnnnnnnnnnnnnnnnnnnnnnnnnnnnnnnnnnnnnnnnnnnnnnnnnnnnnnnnnnnnnnnnnnnnnnnnnnnnnnnnnnnnnnnnnnnnnnnnnnnnnnnnnnnnnnnnnnnnnnnnnnnnnnnnnnnnnnnnnnnnnnnnnnnnnnnnnnnnnnnnnnnnnnnnnnnnnnnnnnnnnnnnnnnnnnnnnnnnnnnnnnnnnnnnnnnnnnnnnnnnnnnnnnnnnnnnnnnnnnnnnnnnnnnnnnnnnnnnnnnnnnnnnnnnnnnnnnnnnnnnnnnnnnnnnnnnnnnnnnnnnnnnnnnnnnnnnnnnnnnnnnnnnnnnnnnnnnnnnnnnnnnnnnnnnnnnnnnnnnnnnnnnnnnnnnnnnnnnnnnnnnnnnnnnnnnnnnnnnnnnnnnnnnnnnnnnnnnnnnnnnnnnnnnnnnnnnnnnnnnnnnnnnnnnnnnnnnnnnnnnnnnnnnnnnnnnnnnnnnnnnnnnnnnnnnnnnnnnnnnnnnnnnnnnnnnnnnnnnnnnnnnnnnnnnnnnnnnnnnnnnnnnnnnnnnnnnnnnnnnnnnnnnnnnnnnnnnnnnnnnnnnnnnnnnnnnnnnnnnnnnnnnnnnnnnnnnnnnnnnnnnnnnnnnnnnnnnnnnnnnnnnnnnnnnnnnnnnnnnnnnnnnnnnnnnnnnnnnnnnnnnnnnnnnnnnnnnnnnnnnnnnnnnnnnnnnnnnnnnnnnnnnnnnnnnnnnnnnnnnnnnnnnnnnnnnnnnnnnnnnnnnnnnnnnnnnnnnnnnnnnnnnnnnnnnnnnnnnnnnnnnnnnnnnnnnnnnnnnnnnnnnnnnnnnnnnnnnnnnnnnnnnnnnnnnnnnnnnnnnnnnnnnnnnnnnnnnnnnnnnnnnnnnnnnnnnnnnnnnnnnnnnnnnnnnnnnnnnnnnnnnnnnnnnnnnnnnnnnnnnnnnnnnnnnnnnnnnnnnnnnnnnnnnnnnnnnnnnnnnnnnnnnnnnnnnnnnnnnnnnnnnnnnnnnnnnnnnnnnnnnnnnnnnnnnnnnnnnnnnnnnnnnnnnnnnnnnnnnnnnnnnnnnnnnnnnnnnnnnnnnnnnnnnnnnnnnnnnnnnnnnnnnnnnnnnnnnnnnnnnnnnnnnnnnnnnnnnnnnnnnnnnnnnnnnnnnnnnnnnnnnnnnnnnnnnnnnnnnnnnnnnnnnnnnnnnnnnnnnnnnnnnnnnnnnnnnnnnnnnnnnnnnnnnnnnnnnnnnnnnnnnnnnnnnnnnnnnnnnnnnnnnnnnnnnnnnnnnnnnnnnnnnnnnnnnnnnnnnnnnnnnnnnnnnnnnnnnnnnnnnnnnnnnnnnnnnnnnnnnnnnnnnnnnnnnnnnnnnnnnnnnnnnnnnnnnnnnnnnnnnnnnnnnnnnnnnnnnnnnnnnnnnnnnnnnnnnnnnnnnnnnnnnnnnnnnnnnnnnnnnnnnnnnnnnnnnnnnnnnnnnnnnnnnnnnnnnnnnnnnnnnnnnnnnnnnnnnnnnnnnnnnnnnnnnnnnnnnnnnnnnnnnnnnnnnnnnnnnnnnnnnnnnnnnnnnnnnnnnnnnnnnnnnnnnnnnnnnnnnnnnnnnnnnnnnnnnnnnnnnnnnnnnnnnnnnnnnnnnnnnnnnnnnnnnnnnnnnnnnnnnnnnnnnnnnnnnnnnnnnnnnnnnnnnnnnnnnnnnnnnnnnnnnnnnnnnnnnnnnnnnnnnnnnnnnnnnnnnnnnnnnnnnnnnnnnnnnnnnnnnnnnnnnnnnnnnnnnnnnnnnnnnnnnnnnnnnnnnnnnnnnnnnnnnnnnnnnnnnnnnnnnnnnnnnnnnnnnnnnnnnnnnnnnnnnnnnnnnnnnnnnnnnnnnnnnnnnnnnnnnnnnnnnnnnnnnnnnnnnnnnnnnnnnnnnnnnnnnnnnnnnnnnnnnnnnnnnnnnnnnnnnnnnnnnnnnnnnnnnnnnnnnnnnnnnnnnnnnnnnnnnnnnnnnnnnnnnnnnnnnnnnnnnnnnnnnnnnnnnnnnnnnnnnnnnnnnnnnnnnnnnnnnnnnnnnnnnnnnnnnnnnnnnnnnnnnnnnnnnnnnnnnnnnnnnnnnnnnnnnnnnnnnnnnnnnnnnnnnnnnnnnnnnnnnnnnnnnnnnnnnnnnnnnnnnnnnnnnnnnnnnnnnnnnnnnnnnnnnnnnnnnnnnnnnnnnnnnnnnnnnnnnnnnnnnnnnnnnnnnnnnnnnnnnnnnnnnnnnnnnnnnnnnnnnnnnnnnnnnnnnnnnnnnnnnnnnnnnnnnnnnnnnnnnnnnnnnnnnnnnnnnnnnnnnnnnnnnnnnnnnnnnnnnnnnnnnnnnnnnnnnnnnnnnnnnnnnnnnnnnnnnnnnnnnnnnnnnnnnnnnnnnnnnnnnnnnnnnnnnnnnnnnnnnnnnnnnnnnnnnnnnnnnnnnnnnnnnnnnnnnnnnnnnnnnnnnnnnnnnnnnnnnnnnnnnnnnnnnnnnnnnnnnnnnnnnnnnnnnnnnnnnnnnnnnnnnnnnnnnnnnnnnnnnnnnnnnnnnnnnnnnnnnnnnnnnnnnnnnnnnnnnnnnnnnnnnnnnnnnnnnnnnnnnnnnnnnnnnnnnnnnnnnnnnnnnnnnnnnnnnnnnnnnnnnnnnnnnnnnnnnnnnnnnnnnnnnnnnnnnnnnnnnnnnnnnnnnnnnnnnnnnnnnnnnnnnnnnnnnnnnnnnnnnnnnnnnnnnnnnnnnnnnnnnnnnnnnnnnnnnnnnnnnnnnnnnnnnnnnnnnnnnnnnnnnnnnnnnnnnnnnnnnnnnnnnnnnnnnnnnnnnnnnnnnnnnnnnnnnnnnnnnnnnnnnnnnnnnnnnnnnnnnnnnnnnnnnnnnnnnnnnnnnnnnnnnnnnnnnnnnnnnnnnnnnnnnnnnnnnnnnnnnnnnnnnnnnnnnnnnnnnnnnnnnnnnnnnnnnnnnnnnnnnnnnnnnnnnnnnnnnnnnnnnnnnnnnnnnnnnnnnnnnnnnnnnnnnnnnnnnnnnnnnnnnnnnnnnnnnnnnnnnnnnnnnnnnnnnnnnnnnnnnnnnnnnnnnnnnnnnnnnnnnnnnnnnnnnnnnnnnnnnnnnnnnnnnnnnnnnnnnnnnnnnnnnnnnnnnnnnnnnnnnnnnnnnnnnnnnnnnnnnnnnnnnnnnnnnnnnnnnnnnnnnnnnnnnnnnnnnnnnnnnnnnnnnnnnnnnnnnnnnnnnnnnnnnnnnnnnnnnnnnnnnnnnnnnnnnnnnnnnnnnnnnnnnnnnnnnnnnnnnnnnnnnnnnnnnnnnnnnnnnnnnnnnnnnnnnnnnnnnnnnnnnnnnnnnnnnnnnnnnnnnnnnnnnnnnnnnnnnnnnnnnnnnnnnnnnnnnnnnnnnnnnnnnnnnnnnnnnnnnnnnnnnnnnnnnnnnnnnnnnnnnnnnnnnnnnnnnnnnnnnnnnnnnnnnnnnnnnnnnnnnnnnnnnnnnnnnnnnnnnnnnnnnnnnnnnnnnnnnnnnnnnnnnnnnnnnnnnnnnnnnnnnnnnnnnnnnnnnnnnnnnnnnnnnnnnnnnnnnnnnnnnnnnnnnnnnnnnnnnnnnnnnnnnnnnnnnnnnnnnnnnnnnnnnnnnnnnnnnnnnnnnnnnnnnnnnnnnnnnnnnnnnnnnnnnnnnnnnnnnnnnnnnnnnnnnnnnnnnnnnnnnnnnnnnnnnnnnnnnnnnnnnnnnnnnnnnnnnnnnnnnnnnnnnnnnnnnnnnnnnnnnnnnnnnnnnnnnnnnnnnnnnnnnnnnnnnnnnnnnnnnnnnnnnnnnnnnnnnnnnnnnnnnnnnnnnnnnnnnnnnnnnnnnnnnnnnnnnnnnnnnnnnnnnnnnnnnnnnnnnnnnnnnnnnnnnnnnnnnnnnnnnnnnnnnnnnnnnnnnnnnnnnnnnnnnnnnnnnnnnnnnnnnnnnnnnnnnnnnnnnnnnnnnnnnnnnnnnnnnnnnnnnnnnnnnnnnnnnnnnnnnnnnnnnnnnnnnnnnnnnnnnnnnnnnnnnnnnnnnnnnnnnnnnnnnnnnnnnnnnnnnnnnnnnnnnnnnnnnnnnnnnnnnnnnnnnnnnnnnnnnnnnnnnnnnnnnnnnnnnnnnnnnnnnnnnnnnnnnnnnnnnnnnnnnnnnnnnnnnnnnnnnnnnnnnnnnnnnnnnnnnnnnnnnnnnnnnnnnnnnnnnnnnnnnnnnnnnnnnnnnnnnnnnnnnnnnnnnnnnnnnnnnnnnnnnnnnnnnnnnnnnnnnnnnnnnnnnnnnnnnnnnnnnnnnnnnnnnnnnnnnnnnnnnnnnnnnnnnnnnnnnnnnnnnnnnnnnnnnnnnnnnnnnnnnnnnnnnnnnnnnnnnnnnnnnnnnnnnnnnnnnnnnnnnnnnnnnnnnnnnnnnnnnnnnnnnnnnnnnnnnnnnnnnnnnnnnnnnnnnnnnnnnnnnnnnnnnnnnnnnnnnnnnnnnnnnnnnnnnnnnnnnnnnnnnnnnnnnnnnnnnnnnnnnnnnnnnnnnnnnnnnnnnnnnnnnnnnnnnnnnnnnnnnnnnnnnnnnnnnnnnnnnnnnnnnnnnnnnnnnnnnnnnnnnnnnnnnnnnnnnnnnnnnnnnnnnnnnnnnnnnnnnnnnnnnnnnnnnnnnnnnnnnnnnnnnnnnnnnnnnnnnnnnnnnnnnnnnnnnnnnnnnnnnnnnnnnnnnnnnnnnnnnnnnnnnnnnnnnnnnnnnnnnnnnnnnnnnnnnnnnnnnnnnnnnnnnnnnnnnnnnnnnnnnnnnnnnnnnnnnnnnnnnnnnnnnnnnnnnnnnnnnnnnnnnnnnnnnnnnnnnnnnnnnnnnnnnnnnnnnnnnnnnnnnnnnnnnnnnnnnnnnnnnnnnnnnnnnnnnnnnnnnnnnnnnnnnnnnnnnnnnnnnnnnnnnnnnnnnnnnnnnnnnnnnnnnnnnnnnnnnnnnnnnnnnnnnnnnnnnnnnnnnnnnnnnnnnnnnnnnnnnnnnnnnnnnnnnnnnnnnnnnnnnnnnnnnnnnnnnnnnnnnnnnnnnnnnnnnnnnnnnnnnnnnnnnnnnnnnnnnnnnnnnnnnnnnnnnnnnnnnnnnnnnnnnnnnnnnnnnnnnnnnnnnnnnnnnnnnnnnnnnnnnnnnnnnnnnnnnnnnnnnnnnnnnnnnnnnnnnnnnnnnnnnnnnnnnnnnnnnnnnnnnnnnnnnnnnnnnnnnnnnnnnnnnnnnnnnnnnnnnnnnnnnnnnnnnnnnnnnnnnnnnnnnnnnnnnnnnnnnnnnnnnnnnnnnnnnnnnnnnnnnnnnnnnnnnnnnnnnnnnnnnnnnnnnnnnnnnnnnnnnnnnnnnnnnnnnnnnnnnnnnnnnnnnnnnnnnnnnnnnnnnnnnnnnnnnnnnnnnnnnnnnnnnnnnnnnnnnnnnnnnnnnnnnnnnnnnnnnnnnnnnnnnnnnnnnnnnnnnnnnnnnnnnnnnnnnnnnnnnnnnnnnnnnnnnnnnnnnnnnnnnnnnnnnnnnnnnnnnnnnnnnnnnnnnnnnnnnnnnnnnnnnnnnnnnnnnnnnnnnnnnnnnnnnnnnnnnnnnnnnnnnnnnnnnnnnnnnnnnnnnnnnnnnnnnnnnnnnnnnnnnnnnnnnnnnnnnnnnnnnnnnnnnnnnnnnnnnnnnnnnnnnnnnnnnnnnnnnnnnnnnnnnnnnnnnnnnnnnnnnnnnnnnnnnnnnnnnnnnnnnnnnnnnnnnnnnnnnnnnnnnnnnnnnnnnnnnnnnnnnnnnnnnnnnnnnnnnnnnnnnnnnnnnnnnnnnnnnnnnnnnnnnnnnnnnnnnnnnnnnnnnnnnnnnnnnnnnnnnnnnnnnnnnnnnnnnnnnnnnnnnnnnnnnnnnnnnnnnnnnnnnnnnnnnnnnnnnnnnnnnnnnnnnnnnnnnnnnnnnnnnnnnnnnnnnnnnnnnnnnnnnnnnnnnnnnnnnnnnnnnnnnnnnnnnnnnnnnnnnnnnnnnnnnnnnnnnnnnnnnnnnnnnnnnnnnnnnnnnnnnnnnnnnnnnnnnnnnnnnnnnnnnnnnnnnnnnnnnnnnnnnnnnnnnnnnnnnnnnnnnnnnnnnnnnnnnnnnnnnnnnnnnnnnnnnnnnnnnnnnnnnnnnnnnnnnnnnnnnnnnnnnnnnnnnnnnnnnnnnnnnnnnnnnnnnnnnnnnnnnnnnnnnnnnnnnnnnnnnnnnnnnnnnnnnnnnnnnnnnnnnnnnnnnnnnnnnnnnnnnnnnnnnnnnnnnnnnnnnnnnnnnnnnnnnnnnnnnnnnnnnnnnnnnnnnnnnnnnnnnnnnnnnnnnnnnnnnnnnnnnnnnnnnnnnnnnnnnnnnnnnnnnnnnnnnnnnnnnnnnnnnnnnnnnnnnnnnnnnnnnnnnnnnnnnnnnnnnnnnnnnnnnnnnnnnnnnnnnnnnnnnnnnnnnnnnnnnnnnnnnnnnnnnnnnnnnnnnnnnnnnnnnnnnnnnnnnnnnnnnnnnnnnnnnnnnnnnnnnnnnnnnnnnnnnnnnnnnnnnnnnnnnnnnnnnnnnnnnnnnnnnnnnnnnnnnnnnnnnnnnnnnnnnnnnnnnnnnnnnnnnnnnnnnnnnnnnnnnnnnnnnnnnnnnnnnnnnnnnnnnnnnnnnnnnnnnnnnnnnnnnnnnnnnnnnnnnnnnnnnnnnnnnnnnnnnnnnnnnnnnnnnnnnnnnnnnnnnnnnnnnnnnnnnnnnnnnnnnnnnnnnnnnnnnnnnnnnnnnnnnnnnnnnnnnnnnnnnnnnnnnnnnnnnnnnnnnnnnnnnnnnnnnnnnnnnnnnnnnnnnnnnnnnnnnnnnnnnnnnnnnnnnnnnnnnnnnnnnnnnnnnnnnnnnnnnnnnnnnnnnnnnnnnnnnnnnnnnnnnnnnnnnnnnnnnnnnnnnnnnnnnnnnnnnnnnnnnnnnnnnnnnnnnnnnnnnnnnnnnnnnnnnnnnnnnnnnnnnnnnnnnnnnnnnnnnnnnnnnnnnnnnnnnnnnnnnnnnnnnnnnnnnnnnnnnnnnnnnnnnnnnnnnnnnnnnnnnnnnnnnnnnnnnnnnnnnnnnnnnnnnnnnnnnnnnnnnnnnnnnnnnnnnnnnnnnnnnnnnnnnnnnnnnnnnnnnnnnnnnnnnnnnnnnnnnnnnnnnnnnnnnnnnnnnnnnnnnnnnnnnnnnnnnnnnnnnnnnnnnnnnnnnnnnnnnnnnnnnnnnnnnnnnnnnnnnnnnnnnnnnnnnnnnnnnnnnnnnnnnnnnnnnnnnnnnnnnnnnnnnnnnnnnnnnnnnnnnnnnnnnnnnnnnnnnnnnnnnnnnnnnnnnnnnnnnnnnnnnnnnnnnnnnnnnnnnnnnnnnnnnnnnnnnnnnnnnnnnnnnnnnnnnnnnnnnnnnnnnnnnnnnnnnnnnnnnnnnnnnnnnnnnnnnnnnnnnnnnnnnnnnnnnnnnnnnnnnnnnnnnnnnnnnnnnnnnnnnnnnnnnnnnnnnnnnnnnnnnnnnnnnnnnnnnnnnnnnnnnnnnnnnnnnnnnnnnnnnnnnnnnnnnnnnnnnnnnnnnnnnnnnnnnnnnnnnnnnnnnnnnnnnnnnnnnnnnnnnnnnnnnnnnnnnnnnnnnnnnnnnnnnnnnnnnnnnnnnnnnnnnnnnnnnnnnnnnnnnnnnnnnnnnnnnnnnnnnnnnnnnnnnnnnnnnnnnnnnnnnnnnnnnnnnnnnnnnnnnnnnnnnnnnnnnnnnnnnnnnnnnnnnnnnnnnnnnnnnnnnnnnnnnnnnnnnnnnnnnnnnnnnnnnnnnnnnnnnnnnnnnnnnnnnnnnnnnnnnnnnnnnnnnnnnnnnnnnnnnnnnnnnnnnnnnnnnnnnnnnnnnnnnnnnnnnnnnnnnnnnnnnnnnnnnnnnnnnnnnnnnnnnnnnnnnnnnnnnnnnnnnnnnnnnnnnnnnnnnnnnnnnnnnnnnnnnnnnnnnnnnnnnnnnnnnnnnnnnnnnnnnnnnnnnnnnnnnnnnnnnnnnnnnnnnnnnnnnnnnnnnnnnnnnnnnnnnnnnnnnnnnnnnnnnnnnnnnnnnnnnnnnnnnnnnnnnnnnnnnnnnnnnnnnnnnnnnnnnnnnnnnnnnnnnnnnnnnnnnnnnnnnnnnnnnnnnnnnnnnnnnnnnnnnnnnnnnnnnnnnnnnnnnnnnnnnnnnnnnnnnnnnnnnnnnnnnnnnnnnnnnnnnnnnnnnnnnnnnnnnnnnnnnnnnnnnnnnnnnnnnnnnnnnnnnnnnnnnnnnnnnnnnnnnnnnnnnnnnnnnnnnnnnnnnnnnnnnnnnnnnnnnnnnnnnnnnnnnnnnnnnnnnnnnnnnnnnnnnnnnnnnnnnnnnnnnnnnnnnnnnnnnnnnnnnnnnnnnnnnnnnnnnnnnnnnnnnnnnnnnnnnnnnnnnnnnnnnnnnnnnnnnnnnnnnnnnnnnnnnnnnnnnnnnnnnnnnnnnnnnnnnnnnnnnnnnnnnnnnnnnnnnnnnnnnnnnnnnnnnnnnnnnnnnnnnnnnnnnnnnnnnnnnnnnnnnnnnnnnnnnnnnnnnnnnnnnnnnnnnnnnnnnnnnnnnnnnnnnnnnnnnnnnnnnnnnnnnnnnnnnnnnnnnnnnnnnnnnnnnnnnnnnnnnnnnnnnnnnnnnnnnnnnnnnnnnnnnnnnnnnnnnnnnnnnnnnnnnnnnnnnnnnnnnnnnnnnnnnnnnnnnnnnnnnnnnnnnnnnnnnnnnnnnnnnnnnnnnnnnnnnnnnnnnnnnnnnnnnnnnnnnnnnnnnnnnnnnnnnnnnnnnnnnnnnnnnnnnnnnnnnnnnnnnnnnnnnnnnnnnnnnnnnnnnnnnnnnnnnnnnnnnnnnnnnnnnnnnnnnnnnnnnnnnnnnnnnnnnnnnnnnnnnnnnnnnnnnnnnnnnnnnnnnnnnnnnnnnnnnnnnnnnnnnnnnnnnnnnnnnnnnnnnnnnnnnnnnnnnnnnnnnnnnnnnnnnnnnnnnnnnnnnnnnnnnnnnnnnnnnnnnnnnnnnnnnnnnnnnnnnnnnnnnnnnnnnnnnnnnnnnnnnnnnnnnnnnnnnnnnnnnnnnnnnnnnnnnnnnnnnnnnnnnnnnnnnnnnnnnnnnnnnnnnnnnnnnnnnnnnnnnnnnnnnnnnnnnnnnnnnnnnnnnnnnnnnnnnnnnnnnnnnnnnnnnnnnnnnnnnnnnnnnnnnnnnnnnnnnnnnnnnnnnnnnnnnnnnnnnnnnnnnnnnnnnnnnnnnnnnnnnnnnnnnnnnnnnnnnnnnnnnnnnnnnnnnnnnnnnnnnnnnnnnnnnnnnnnnnnnnnnnnnnnnnnnnnnnnnnnnnnnnnnnnnnnnnnnnnnnnnnnnnnnnnnnnnnnnnnnnnnnnnnnnnnnnnnnnnnnnnnnnnnnnnnnnnnnnnnnnnnnnnnnnnnnnnnnnnnnnnnnnnnnnnnnnnnnnnnnnnnnnnnnnnnnnnnnnnnnnnnnnnnnnnnnnnnnnnnnnnnnnnnnnnnnnnnnnnnnnnnnnnnnnnnnnnnnnnnnnnnnnnnnnnnnnnnnnnnnnnnnnnnnnnnnnnnnnnnnnnnnnnnnnnnnnnnnnnnnnnnnnnnnnnnnnnnnnnnnnnnnnnnnnnnnnnnnnnnnnnnnnnnnnnnnnnnnnnnnnnnnnnnnnnnnnnnnnnnnnnnnnnnnnnnnnnnnnnnnnnnnnnnnnnnnnnnnnnnnnnnnnnnnnnnnnnnnnnnnnnnnnnnnnnnnnnnnnnnnnnnnnnnnnnnnnnnnnnnnnnnnnnnnnnnnnnnnnnnnnnnnnnnnnnnnnnnnnnnnnnnnnnnnnnnnnnnnnnnnnnnnnnnnnnnnnnnnnnnnnnnnnnnnnnnnnnnnnnnnnnnnnnnnnnnnnnnnnnnnnnnnnnnnnnnnnnnnnnnnnnnnnnnnnnnnnnnnnnnnnnnnnnnnnnnnnnnnnnnnnnnnnnnnnnnnnnnnnnnnnnnnnnnnnnnnnnnnnnnnnnnnnnnnnnnnnnnnnnnnnnnnnnnnnnnnnnnnnnnnnnnnnnnnnnnnnnnnnnnnnnnnnnnnnnnnnnnnnnnnnnnnnnnnnnnnnnnnnnnnnnnnnnnnnnnnnnnnnnnnnnnnnnnnnnnnnnnnnnnnnnnnnnnnnnnnnnnnnnnnnnnnnnnnnnnnnnnnnnnnnnnnnnnnnnnnnnnnnnnnnnnnnnnnnnnnnnnnnnnnnnnnnnnnnnnnnnnnnnnnnnnnnnnnnnnnnnnnnnnnnnnnnnnnnnnnnnnnnnnnnnnnnnnnnnnnnnnnnnnnnnnnnnnnnnnnnnnnnnnnnnnnnnnnnnnnnnnnnnnnnnnnnnnnnnnnnnnnnnnnnnnnnnnnnnnnnnnnnnnnnnnnnnnnnnnnnnnnnnnnnnnnnnnnnnnnnnnnnnnnnnnnnnnnnnnnnnnnnnnnnnnnnnnnnnnnnnnnnnnnnnnnnnnnnnnnnnnnnnnnnnnnnnnnnnnnnnnnnnnnnnnnnnnnnnnnnnnnnnnnnnnnnnnnnnnnnnnnnnnnnnnnnnnnnnnnnnnnnnnnnnnnnnnnnnnnnnnnnnnnnnnnnnnnnnnnnnnnnnnnnnnnnnnnnnnnnnnnnnnnnnnnnnnnnnnnnnnnnnnnnnnnnnnnnnnnnnnnnnnnnnnnnnnnnnnnnnnnnnnnnnnnnnnnnnnnnnnnnnnnnnnnnnnnnnnnnnnnnnnnnnnnnnnnnnnnnnnnnnnnnnnnnnnnnnnnnnnnnnnnnnnnnnnnnnnnnnnnnnnnnnnnnnnnnnnnnnnnnnnnnnnnnnnnnnnnnnnnnnnnnnnnnnnnnnnnnnnnnnnnnnnnnnnnnnnnnnnnnnnnnnnnnnnnnnnnnnnnnnnnnnnnnnnnnnnnnnnnnnnnnnnnnnnnnnnnnnnnnnnnnnnnnnnnnnnnnnnnnnnnnnnnnnnnnnnnnnnnnnnnnnnnnnnnnnnnnnnnnnnnnnnnnnnnnnnnnnnnnnnnnnnnnnnnnnnnnnnnnnnnnnnnnnnnnnnnnnnnnnnnnnnnnnnnnnnnnnnnnnnnnnnnnnnnnnnnnnnnnnnnnnnnnnnnnnnnnnnnnnnnnnnnnnnnnnnnnnnnnnnnnnnnnnnnnnnnnnnnnnnnnnnnnnnnnnnnnnnnnnnnnnnnnnnnnnnnnnnnnnnnnnnnnnnnnnnnnnnnnnnnnnnnnnnnnnnnnnnnnnnnnnnnnnnnnnnnnnnnnnnnnnnnnnnnnnnnnnnnnnnnnnnnnnnnnnnnnnnnnnnnnnnnnnnnnnnnnnnnnnnnnnnnnnnnnnnnnnnnnnnnnnnnnnnnnnnnnnnnnnnnnnnnnnnnnnnnnnnnnnnnnnnnnnnnnnnnnnnnnnnnnnnnnnnnnnnnnnnnnnnnnnnnnnnnnnnnnnnnnnnnnnnnnnnnnnnnnnnnnnnnnnnnnnnnnnnnnnnnnnnnnnnnnnnnnnnnnnnnnnnnnnnnnnnnnnnnnnnnnnnnnnnnnnnnnnnnnnnnnnnnnnnnnnnnnnnnnnnnnnnnnnnnnnnnnnnnnnnnnnnnnnnnnnnnnnnnnnnnnnnnnnnnnnnnnnnnnnnnnnnnnnnnnnnnnnnnnnnnnnnnnnnnnnnnnnnnnnnnnnnnnnnnnnnnnnnnnnnnnnnnnnnnnnnnnnnnnnnnnnnnnnnnnnnnnnnnnnnnnnnnnnnnnnnnnnnnnnnnnnnnnnnnnnnnnnnnnnnnnnnnnnnnnnnnnnnnnnnnnnnnnnnnnnnnnnnnnnnnnnnnnnnnnnnnnnnnnnnnnnnnnnnnnnnnnnnnnnnnnnnnnnnnnnnnnnnnnnnnnnnnnnnnnnnnnnnnnnnnnnnnnnnnnnnnnnnnnnnnnnnnnnnnnnnnnnnnnnnnnnnnnnnnnnnnnnnnnnnnnnnnnnnnnnnnnnnnnnnnnnnnnnnnnnnnnnnnnnnnnnnnnnnnnnnnnnnnnnnnnnnnnnnnnnnnnnnnnnnnnnnnnnnnnnnnnnnnnnnnnnnnnnnnnnnnnnnnnnnnnnnnnnnnnnnnnnnnnnnnnnnnnnnnnnnnnnnnnnnnnnnnnnnnnnnnnnnnnnnnnnnnnnnnnnnnnnnnnnnnnnnnnnnnnnnnnnnnnnnnnnnnnnnnnnnnnnnnnnnnnnnnnnnnnnnnnnnnnnnnnnnnnnnnnnnnnnnnnnnnnnnnnnnnnnnnnnnnnnnnnnnnnnnnnnnnnnnnnnnnnnnnnnnnnnnnnnnnnnnnnnnnnnnnnnnnnnnnnnnnnnnnnnnnnnnnnnnnnnnnnnnnnnnnnnnnnnnnnnnnnnnnnnnnnnnnnnnnnnnnnnnnnnnnnnnnnnnnnnnnnnnnnnnnnnnnnnnnnnnnnnnnnnnnnnnnnnnnnnnnnnnnnnnnnnnnnnnnnnnnnnnnnnnnnnnnnnnnnnnnnnnnnnnnnnnnnnnnnnnnnnnnnnnnnnnnnnnnnnnnnnnnnnnnnnnnnnnnnnnnnnnnnnnnnnnnnnnnnnnnnnnnnnnnnnnnnnnnnnnnnnnnnnnnnnnnnnnnnnnnnnnnnnnnnnnnnnnnnnnnnnnnnnnnnnnnnnnnnnnnnnnnnnnnnnnnnnnnnnnnnnnnnnnnnnnnnnnnnnnnnnnnnnnnnnnnnnnnnnnnnnnnnnnnnnnnnnnnnnnnnnnnnnnnnnnnnnnnnnnnnnnnnnnnnnnnnnnnnnnnnnnnnnnnnnnnnnnnnnnnnnnnnnnnnnnnnnnnnnnnnnnnnnnnnnnnnnnnnnnnnnnnnnnnnnnnnnnnnnnnnnnnnnnnnnnnnnnnnnnnnnnnnnnnnnnnnnnnnnnnnnnnnnnnnnnnnnnnnnnnnnnnnnnnnnnnnnnnnnnnnnnnnnnnnnnnnnnnnnnnnnnnnnnnnnnnnnnnnnnnnnnnnnnnnnnnnnnnnnnnnnnnnnnnnnnnnnnnnnnnnnnnnnnnnnnnnnnnnnnnnnnnnnnnnnnnnnnnnnnnnnnnnnnnnnnnnnnnnnnnnnnnnnnnnnnnnnnnnnnnnnnnnnnnnnnnnnnnnnnnnnnnnnnnnnnnnnnnnnnnnnnnnnnnnnnnnnnnnnnnnnnnnnnnnnnnnnnnnnnnnnnnnnnnnnnnnnnnnnnnnnnnnnnnnnnnnnnnnnnnnnnnnnnnnnnnnnnnnnnnnnnnnnnnnnnnnnnnnnnnnnnnnnnnnnnnnnnnnnnnnnnnnnnnnnnnnnnnnnnnnnnnnnnnnnnnnnnnnnnnnnnnnnnnnnnnnnnnnnnnnnnnnnnnnnnnnnnnnnnnnnnnnnnnnnnnnnnnnnnnnnnnnnnnnnnnnnnnnnnnnnnnnnnnnnnnnnnnnnnnnnnnnnnnnnnnnnnnnnnnnnnnnnnnnnnnnnnnnnnnnnnnnnnnnnnnnnnnnnnnnnnnnnnnnnnnnnnnnnnnnnnnnnnnnnnnnnnnnnnnnnnnnnnnnnnnnnnnnnnnnnnnnnnnnnnnnnnnnnnnnnnnnnnnnnnnnnnnnnnnnnnnnnnnnnnnnnnnnnnnnnnnnnnnnnnnnnnnnnnnnnnnnnnnnnnnnnnnnnnnnnnnnnnnnnnnnnnnnnnnnnnnnnnnnnnnnnnnnnnnnnnnnnnnnnnnnnnnnnnnnnnnnnnnnnnnnnnnnnnnnnnnnnnnnnnnnnnnnnnnnnnnnnnnnnnnnnnnnnnnnnnnnnnnnnnnnnnnnnnnnnnnnnnnnnnnnnnnnnnnnnnnnnnnnnnnnnnnnnnnnnnnnnnnnnnnnnnnnnnnnnnnnnnnnnnnnnnnnnnnnnnnnnnnnnnnnnnnnnnnnnnnnnnnnnnnnnnnnnnnnnnnnnnnnnnnnnnnnnnnnnnnnnnnnnnnnnnnnnnnnnnnnnnnnnnnnnnnnnnnnnnnnnnnnnnnnnnnnnnnnnnnnnnnnnnnnnnnnnnnnnnnnnnnnnnnnnnnnnnnnnnnnnnnnnnnnnnnnnnnnnnnnnnnnnnnnnnnnnnnnnnnnnnnnnnnnnnnnnnnnnnnnnnnnnnnnnnnnnnnnnnnnnnnnnnnnnnnnnnnnnnnnnnnnnnnnnnnnnnnnnnnnnnnnnnnnnnnnnnnnnnnnnnnnnnnnnnnnnnnnnnnnnnnnnnnnnnnnnnnnnnnnnnnnnnnnnnnnnnnnnnnnnnnnnnnnnnnnnnnnnnnnnnnnnnnnnnnnnnnnnnnnnnnnnnnnnnnnnnnnnnnnnnnnnnnnnnnnnnnnnnnnnnnnnnnnnnnnnnnnnnnnnnnnnnnnnnnnnnnnnnnnnnnnnnnnnnnnnnnnnnnnnnnnnnnnnnnnnnnnnnnnnnnnnnnnnnnnnnnnnnnnnnnnnnnnnnnnnnnnnnnnnnnnnnnnnnnnnnnnnnnnnnnnnnnnnnnnnnnnnnnnnnnnnnnnnnnnnnnnnnnnnnnnnnnnnnnnnnnnnnnnnnnnnnnnnnnnnnnnnnnnnnnnnnnnnnnnnnnnnnnnnnnnnnnnnnnnnnnnnnnnnnnnnnnnnnnnnnnnnnnnnnnnnnnnnnnnnnnnnnnnnnnnnnnnnnnnnnnnnnnnnnnnnnnnnnnnnnnnnnnnnnnnnnnnnnnnnnnnnnnnnnnnnnnnnnnnnnnnnnnnnnnnnnnnnnnnnnnnnnnnnnnnnnnnnnnnnnnnnnnnnnnnnnnnnnnnnnnnnnnnnnnnnnnnnnnnnnnnnnnnnnnnnnnnnnnnnnnnnnnnnnnnnnnnnnnnnnnnnnnnnnnnnnnnnnnnnnnnnnnnnnnnnnnnnnnnnnnnnnnnnnnnnnnnnnnnnnnnnnnnnnnnnnnnnnnnnnnnnnnnnnnnnnnnnnnnnnnnnnnnnnnnnnnnnnnnnnnnnnnnnnnnnnnnnnnnnnnnnnnnnnnnnnnnnnnnnnnnnnnnnnnnnnnnnnnnnnnnnnnnnnnnnnnnnnnnnnnnnnnnnnnnnnnnnnnnnnnnnnnnnnnnnnnnnnnnnnnnnnnnnnnnnnnnnnnnnnnnnnnnnnnnnnnnnnnnnnnnnnnnnnnnnnnnnnnnnnnnnnnnnnnnnnnnnnnnnnnnnnnnnnnnnnnnnnnnnnnnnnnnnnnnnnnnnnnnnnnnnnnnnnnnnnnnnnnnnnnnnnnnnnnnnnnnnnnnnnnnnnnnnnnnnnnnnnnnnnnnnnnnnnnnnnnnnnnnnnnnnnnnnnnnnnnnnnnnnnnnnnnnnnnnnnnnnnnnnnnnnnnnnnnnnnnnnnnnnnnnnnnnnnnnnnnnnnnnnnnnnnnnnnnnnnnnnnnnnnnnnnnnnnnnnnnnnnnnnnnnnnnnnnnnnnnnnnnnnnnnnnnnnnnnnnnnnnnnnnnnnnnnnnnnnnnnnnnnnnnnnnnnnnnnnnnnnnnnnnnnnnnnnnnnnnnnnnnnnnnnnnnnnnnnnnnnnnnnnnnnnnnnnnnnnnnnnnnnnnnnnnnnnnnnnnnnnnnnnnnnnnnnnnnnnnnnnnnnnnnnnnnnnnnnnnnnnnnnnnnnnnnnnnnnnnnnnnnnnnnnnnnnnnnnnnnnnnnnnnnnnnnnnnnnnnnnnnnnnnnnnnnnnnnnnnnnnnnnnnnnnnnnnnnnnnnnnnnnnnnnnnnnnnnnnnnnnnnnnnnnnnnnnnnnnnnnnnnnnnnnnnnnnnnnnnnnnnnnnnnnnnnnnnnnnnnnnnnnnnnnnnnnnnnnnnnnnnnnnnnnnnnnnnnnnnnnnnnnnnnnnnnnnnnnnnnnnnnnnnnnnnnnnnnnnnnnnnnnnnnnnnnnnnnnnnnnnnnnnnnnnnnnnnnnnnnnnnnnnnnnnnnnnnnnnnnnnnnnnnnnnnnnnnnnnnnnnnnnnnnnnnnnnnnnnnnnnnnnnnnnnnnnnnnnnnnnnnnnnnnnnnnnnnnnnnnnnnnnnnnnnnnnnnnnnnnnnnnnnnnnnnnnnnnnnnnnnnnnnnnnnnnnnnnnnnnnnnnnnnnnnnnnnnnnnnnnnnnnnnnnnnnnnnnnnnnnnnnnnnnnnnnnnnnnnnnnnnnnnnnnnnnnnnnnnnnnnnnnnnnnnnnnnnnnnnnnnnnnnnnnnnnnnnnnnnnnnnnnnnnnnnnnnnnnnnnnnnnnnnnnnnnnnnnnnnnnnnnnnnnnnnnnnnnnnnnnnnnnnnnnnnnnnnnnnnnnnnnnnnnnnnnnnnnnnnnnnnnnnnnnnnnnnnnnnnnnnnnnnnnnnnnnnnnnnnnnnnnnnnnnnnnnnnnnnnnnnnnnnnnnnnnnnnnnnnnnnnnnnnnnnnnnnnnnnnnnnnnnnnnnnnnnnnnnnnnnnnnnnnnnnnnnnnnnnnnnnnnnnnnnnnnnnnnnnnnnnnnnnnnnnnnnnnnnnnnnnnnnnnnnnnnnnnnnnnnnnnnnnnnnnnnnnnnnnnnnnnnnnnnnnnnnnnnnnnnnnnnnnnnnnnnnnnnnnnnnnnnnnnnnnnnnnnnnnnnnnnnnnnnnnnnnnnnnnnnnnnnnnnnnnnnnnnnnnnnnnnnnnnnnnnnnnnnnnnnnnnnnnnnnnnnnnnnnnnnnnnnnnnnnnnnnnnnnnnnnnnnnnnnnnnnnnnnnnnnnnnnnnnnnnnnnnnnnnnnnnnnnnnnnnnnnnnnnnnnnnnnnnnnnnnnnnnnnnnnnnnnnnnnnnnnnnnnnnnnnnnnnnnnnnnnnnnnnnnnnnnnnnnnnnnnnnnnnnnnnnnnnnnnnnnnnnnnnnnnnnnnnnnnnnnnnnnnnnnnnnnnnnnnnnnnnnnnnnnnnnnnnnnnnnnnnnnnnnnnnnnnnnnnnnnnnnnnnnnnnnnnnnnnnnnnnnnnnnnnnnnnnnnnnnnnnnnnnnnnnnnnnnnnnnnnnnnnnnnnnnnnnnnnnnnnnnnnnnnnnnnnnnnnnnnnnnnnnnnnnnnnnnnnnnnnnnnnnnnnnnnnnnnnnnnnnnnnnnnnnnnnnnnnnnnnnnnnnnnnnnnnnnnnnnnnnnnnnnnnnnnnnnnnnnnnnnnnnnnnnnnnnnnnnnnnnnnnnnnnnnnnnnnnnnnnnnnnnnnnnnnnnnnnnnnnnnnnnnnnnnnnnnnnnnnnnnnnnnnnnnnnnnnnnnnnnnnnnnnnnnnnnnnnnnnnnnnnnnnnnnnnnnnnnnnnnnnnnnnnnnnnnnnnnnnnnnnnnnnnnnnnnnnnnnnnnnnnnnnnnnnnnnnnnnnnnnnnnnnnnnnnnnnnnnnnnnnnnnnnnnnnnnnnnnnnnnnnnnnnnnnnnnnnnnnnnnnnnnnnnnnnnnnnnnnnnnnnnnnnnnnnnnnnnnnnnnnnnnnnnnnnnnnnnnnnnnnnnnnnnnnnnnnnnnnnnnnnnnnnnnnnnnnnnnnnnnnnnnnnnnnnnnnnnnnnnnnnnnnnnnnnnnnnnnnnnnnnnnnnnnnnnnnnnnnnnnnnnnnnnnnnnnnnnnnnnnnnnnnnnnnnnnnnnnnnnnnnnnnnnnnnnnnnnnnnnnnnnnnnnnnnnnnnnnnnnnnnnnnnnnnnnnnnnnnnnnnnnnnnnnnnnnnnnnnnnnnnnnnnnnnnnnnnnnnnnnnnnnnnnnnnnnnnnnnnnnnnnnnnnnnnnnnnnnnnnnnnnnnnnnnnnnnnnnnnnnnnnnnnnnnnnnnnnnnnnnnnnnnnnnnnnnnnnnnnnnnnnnnnnnnnnnnnnnnnnnnnnnnnnnnnnnnnnnnnnnnnnnnnnnnnnnnnnnnnnnnnnnnnnnnnnnnnnnnnnnnnnnnnnnnnnnnnnnnnnnnnnnnnnnnnnnnnnnnnnnnnnnnnnnnnnnnnnnnnnnnnnnnnnnnnnnnnnnnnnnnnnnnnnnnnnnnnnnnnnnnnnnnnnnnnnnnnnnnnnnnnnnnnnnnnnnnnnnnnnnnnnnnnnnnnnnnnnnnnnnnnnnnnnnnnnnnnnnnnnnnnnnnnnnnnnnnnnnnnnnnnnnnnnnnnnnnnnnnnnnnnnnnnnnnnnnnnnnnnnnnnnnnnnnnnnnnnnnnnnnnnnnnnnnnnnnnnnnnnnnnnnnnnnnnnnnnnnnnnnnnnnnnnnnnnnnnnnnnnnnnnnnnnnnnnnnnnnnnnnnnnnnnnnnnnnnnnnnnnnnnnnnnnnnnnnnnnnnnnnnnnnnnnnnnnnnnnnnnnnnnnnnnnnnnnnnnnnnnnnnnnnnnnnnnnnnnnnnnnnnnnnnnnnnnnnnnnnnnnnnnnnnnnnnnnnnnnnnnnnnnnnnnnnnnnnnnnnnnnnnnnnnnnnnnnnnnnnnnnnnnnnnnnnnnnnnnnnnnnnnnnnnnnnnnnnnnnnnnnnnnnnnnnnnnnnnnnnnnnnnnnnnnnnnnnnnnnnnnnnnnnnnnnnnnnnnnnnnnnnnnnnnnnnnnnnnnnnnnnnnnnnnnnnnnnnnnnnnnnnnnnnnnnnnnnnnnnnnnnnnnnnnnnnnnnnnnnnnnnnnnnnnnnnnnnnnnnnnnnnnnnnnnnnnnnnnnnnnnnnnnnnnnnnnnnnnnnnnnnnnnnnnnnnnnnnnnnnnnnnnnnnnnnnnnnnnnnnnnnnnnnnnnnnnnnnnnnnnnnnnnnnnnnnnnnnnnnnnnnnnnnnnnnnnnnnnnnnnnnnnnnnnnnnnnnnnnnnnnnnnnnnnnnnnnnnnnnnnnnnnnnnnnnnnnnnnnnnnnnnnnnnnnnnnnnnnnnnnnnnnnnnnnnnnnnnnnnnnnnnnnnnnnnnnnnnnnnnnnnnnnnnnnnnnnnnnnnnnnnnnnnnnnnnnnnnnnnnnnnnnnnnnnnnnnnnnnnnnnnnnnnnnnnnnnnnnnnnnnnnnnnnnnnnnnnnnnnnnnnnnnnnnnnnnnnnnnnnnnnnnnnnnnnnnnnnnnnnnnnnnnnnnnnnnnnnnnnnnnnnnnnnnnnnnnnnnnnnnnnnnnnnnnnnnnnnnnnnnnnnnnnnnnnnnnnnnnnnnnnnnnnnnnnnnnnnnnnnnnnnnnnnnnnnnnnnnnnnnnnnnnnnnnnnnnnnnnnnnnnnnnnnnnnnnnnnnnnnnnnnnnnnnnnnnnnnnnnnnnnnnnnnnnnnnnnnnnnnnnnnnnnnnnnnnnnnnnnnnnnnnnnnnnnnnnnnnnnnnnnnnnnnnnnnnnnnnnnnnnnnnnnnnnnnnnnnnnnnnnnnnnnnnnnnnnnnnnnnnnnnnnnnnnnnnnnnnnnnnnnnnnnnnnnnnnnnnnnnnnnnnnnnnnnnnnnnnnnnnnnnnnnnnnnnnnnnnnnnnnnnnnnnnnnnnnnnnnnnnnnnnnnnnnnnnnnnnnnnnnnnnnnnnnnnnnnnnnnnnnnnnnnnnnnnnnnnnnnnnnnnnnnnnnnnnnnnnnnnnnnnnnnnnnnnnnnnnnnnnnnnnnnnnnnnnnnnnnnnnnnnnnnnnnnnnnnnnnnnnnnnnnnnnnnnnnnnnnnnnnnnnnnnnnnnnnnnnnnnnnnnnnnnnnnnnnnnnnnnnnnnnnnnnnnnnnnnnnnnnnnnnnnnnnnnnnnnnnnnnnnnnnnnnnnnnnnnnnnnnnnnnnnnnnnnnnnnnnnnnnnnnnnnnnnnnnnnnnnnnnnnnnnnnnnnnnnnnnnnnnnnnnnnnnnnnnnnnnnnnnnnnnnnnnnnnnnnnnnnnnnnnnnnnnnnnnnnnnnnnnnnnnnnnnnnnnnnnnnnnnnnnnnnnnnnnnnnnnnnnnnnnnnnnnnnnnnnnnnnnnnnnnnnnnnnnnnnnnnnnnnnnnnnnnnnnnnnnnnnnnnnnnnnnnnnnnnnnnnnnnnnnnnnnnnnnnnnnnnnnnnnnnnnnnnnnnnnnnnnnnnnnnnnnnnnnnnnnnnnnnnnnnnnnnnnnnnnnnnnnnnnnnnnnnnnnnnnnnnnnnnnnnnnnnnnnnnnnnnnnnnnnnnnnnnnnnnnnnnnnnnnnnnnnnnnnnnnnnnnnnnnnnnnnnnnnnnnnnnnnnnnnnnnnnnnnnnnnnnnnnnnnnnnnnnnnnnnnnnnnnnnnnnnnnnnnnnnnnnnnnnnnnnnnnnnnnnnnnnnnnnnnnnnnnnnnnnnnnnnnnnnnnnnnnnnnnnnnnnnnnnnnnnnnnnnnnnnnnnnnnnnnnnnnnnnnnnnnnnnnnnnnnnnnnnnnnnnnnnnnnnnnnnnnnnnnnnnnnnnnnnnnnnnnnnnnnnnnnnnnnnnnnnnnnnnnnnnnnnnnnnnnnnnnnnnnnnnnnnnnnnnnnnnnnnnnnnnnnnnnnnnnnnnnnnnnnnnnnnnnnnnnnnnnnnnnnnnnnnnnnnnnnnnnnnnnnnnnnnnnnnnnnnnnnnnnnnnnnnnnnnnnnnnnnnnnnnnnnnnnnnnnnnnnnnnnnnnnnnnnnnnnnnnnnnnnnnnnnnnnnnnnnnnnnnnnnnnnnnnnnnnnnnnnnnnnnnnnnnnnnnnnnnnnnnnnnnnnnnnnnnnnnnnnnnnnnnnnnnnnnnnnnnnnnnnnnnnnnnnnnnnnnnnnnnnnnnnnnnnnnnnnnnnnnnnnnnnnnnnnnnnnnnnnnnnnnnnnnnnnnnnnnnnnnnnnnnnnnnnnnnnnnnnnnnnnnnnnnnnnnnnnnnnnnnnnnnnnnnnnnnnnnnnnnnnnnnnnnnnnnnnnnnnnnnnnnnnnnnnnnnnnnnnnnnnnnnnnnnnnnnnnnnnnnnnnnnnnnnnnnnnnnnnnnnnnnnnnnnnnnnnnnnnnnnnnnnnnnnnnnnnnnnnnnnnnnnnnnnnnnnnnnnnnnnnnnnnnnnnnnnnnnnnnnnnnnnnnnnnnnnnnnnnnnnnnnnnnnnnnnnnnnnnnnnnnnnnnnnnnnnnnnnnnnnnnnnnnnnnnnnnnnnnnnnnnnnnnnnnnnnnnnnnnnnnnnnnnnnnnnnnnnnnnnnnnnnnnnnnnnnnnnnnnnnnnnnnnnnnnnnnnnnnnnnnnnnnnnnnnnnnnnnnnnnnnnnnnnnnnnnnnnnnnnnnnnnnnnnnnnnnnnnnnnnnnnnnnnnnnnnnnnnnnnnnnnnnnnnnnnnnnnnnnnnnnnnnnnnnnnnnnnnnnnnnnnnnnnnnnnnnnnnnnnnnnnnnnnnnnnnnnnnnnnnnnnnnnnnnnnnnnnnnnnnnnnnnnnnnnnnnnnnnnnnnnnnnnnnnnnnnnnnnnnnnnnnnnnnnnnnnnnnnnnnnnnnnnnnnnnnnnnnnnnnnnnnnnnnnnnnnnnnnnnnnnnnnnnnnnnnnnnnnnnnnnnnnnnnnnnnnnnnnnnnnnnnnnnnnnnnnnnnnnnnnnnnnnnnnnnnnnnnnnnnnnnnnnnnnnnnnnnnnnnnnnnnnnnnnnnnnnnnnnnnnnnnnnnnnnnnnnnnnnnnnnnnnnnnnnnnnnnnnnnnnnnnnnnnnnnnnnnnnnnnnnnnnnnnnnnnnnnnnnnnnnnnnnnnnnnnnnnnnnnnnnnnnnnnnnnnnnnnnnnnnnnnnnnnnnnnnnnnnnnnnnnnnnnnnnnnnnnnnnnnnnnnnnnnnnnnnnnnnnnnnnnnnnnnnnnnnnnnnnnnnnnnnnnnnnnnnnnnnnnnnnnnnnnnnnnnnnnnnnnnnnnnnnnnnnnnnnnnnnnnnnnnnnnnnnnnnnnnnnnnnnnnnnnnnnnnnnnnnnnnnnnnnnnnnnnnnnnnnnnnnnnnnnnnnnnnnnnnnnnnnnnnnnnnnnnnnnnnnnnnnnnnnnnnnnnnnnnnnnnnnnnnnnnnnnnnnnnnnnnnnnnnnnnnnnnnnnnnnnnnnnnnnnnnnnnnnnnnnnnnnnnnnnnnnnnnnnnnnnnnnnnnnnnnnnnnnnnnnnnnnnnnnnnnnnnnnnnnnnnnnnnnnnnnnnnnnnnnnnnnnnnnnnnnnnnnnnnnnnnnnnnnnnnnnnnnnnnnnnnnnnnnnnnnnnnnnnnnnnnnnnnnnnnnnnnnnnnnnnnnnnnnnnnnnnnnnnnnnnnnnnnnnnnnnnnnnnnnnnnnnnnnnnnnnnnnnnnnnnnnnnnnnnnnnnnnnnnnnnnnnnnnnnnnnnnnnnnnnnnnnnnnnnnnnnnnnnnnnnnnnnnnnnnnnnnnnnnnnnnnnnnnnnnnnnnnnnnnnnnnnnnnnnnnnnnnnnnnnnnnnnnnnnnnnnnnnnnnnnnnnnnnnnnnnnnnnnnnnnnnnnnnnnnnnnnnnnnnnnnnnnnnnnnnnnnnnnnnnnnnnnnnnnnnnnnnnnnnnnnnnnnnnnnnnnnnnnnnnnnnnnnnnnnnnnnnnnnnnnnnnnnnnnnnnnnnnnnnnnnnnnnnnnnnnnnnnnnnnnnnnnnnnnnnnnnnnnnnnnnnnnnnnnnnnnnnnnnnnnnnnnnnnnnnnnnnnnnnnnnnnnnnnnnnnnnnnnnnnnnnnnnnnnnnnnnnnnnnnnnnnnnnnnnnnnnnnnnnnnnnnnnnnnnnnnnnnnnnnnnnnnnnnnnnnnnnnnnnnnnnnnnnnnnnnnnnnnnnnnnnnnnnnnnnnnnnnnnnnnnnnnnnnnnnnnnnnnnnnnnnnnnnnnnnnnnnnnnnnnnnnnnnnnnnnnnnnnnnnnnnnnnnnnnnnnnnnnnnnnnnnnnnnnnnnnnnnnnnnnnnnnnnnnnnnnnnnnnnnnnnnnnnnnnnnnnnnnnnnnnnnnnnnnnnnnnnnnnnnnnnnnnnnnnnnnnnnnnnnnnnnnnnnnnnnnnnnnnnnnnnnnnnnnnnnnnnnnnnnnnnnnnnnnnnnnnnnnnnnnnnnnnnnnnnnnnnnnnnnnnnnnnnnnnnnnnnnnnnnnnnnnnnnnnnnnnnnnnnnnnnnnnnnnnnnnnnnnnnnnnnnnnnnnnnnnnnnnnnnnnnnnnnnnnnnnnnnnnnnnnnnnnnnnnnnnnnnnnnnnnnnnnnnnnnnnnnnnnnnnnnnnnnnnnnnnnnnnnnnnnnnnnnnnnnnnnnnnnnnnnnnnnnnnnnnnnnnnnnnnnnnnnnnnnnnnnnnnnnnnnnnnnnnnnnnnnnnnnnnnnnnnnnnnnnnnnnnnnnnnnnnnnnnnnnnnnnnnnnnnnnnnnnnnnnnnnnnnnnnnnnnnnnnnnnnnnnnnnnnnnnnnnnnnnnnnnnnnnnnnnnnnnnnnnnnnnnnnnnnnnnnnnnnnnnnnnnnnnnnnnnnnnnnnnnnnnnnnnnnnnnnnnnnnnnnnnnnnnnnnnnnnnnnnnnnnnnnnnnnnnnnnnnnnnnnnnnnnnnnnnnnnnnnnnnnnnnnnnnnnnnnnnnnnnnnnnnnnnnnnnnnnnnnnnnnnnnnnnnnnnnnnnnnnnnnnnnnnnnnnnnnnnnnnnnnnnnnnnnnnnnnnnnnnnnnnnnnnnnnnnnnnnnnnnnnnnnnnnnnnnnnnnnnnnnnnnnnnnnnnnnnnnnnnnnnnnnnnnnnnnnnnnnnnnnnnnnnnnnnnnnnnnnnnnnnnnnnnnnnnnnnnnnnnnnnnnnnnnnnnnnnnnnnnnnnnnnnnnnnnnnnnnnnnnnnnnnnnnnnnnnnnnnnnnnnnnnnnnnnnnnnnnnnnnnnnnnnnnnnnnnnnnnnnnnnnnnnnnnnnnnnnnnnnnnnnnnnnnnnnnnnnnnnnnnnnnnnnnnnnnnnnnnnnnnnnnnnnnnnnnnnnnnnnnnnnnnnnnnnnnnnnnnnnnnnnnnnnnnnnnnnnnnnnnnnnnnnnnnnnnnnnnnnnnnnnnnnnnnnnnnnnnnnnnnnnnnnnnnnnnnnnnnnnnnnnnnnnnnnnnnnnnnnnnnnnnnnnnnnnnnnnnnnnnnnnnnnnnnnnnnnnnnnnnnnnnnnnnnnnnnnnnnnnnnnnnnnnnnnnnnnnnnnnnnnnnnnnnnnnnnnnnnnnnnnnnnnnnnnnnnnnnnnnnnnnnnnnnnnnnnnnnnnnnnnnnnnnnnnnnnnnnnnnnnnnnnnnnnnnnnnnnnnnnnnnnnnnnnnnnnnnnnnnnnnnnnnnnnnnnnnnnnnnnnnnnnnnnnnnnnnnnnnnnnnnnnnnnnnnnnnnnnnnnnnnnnnnnnnnnnnnnnnnnnnnnnnnnnnnnnnnnnnnnnnnnnnnnnnnnnnnnnnnnnnnnnnnnnnnnnnnnnnnnnnnnnnnnnnnnnnnnnnnnnnnnnnnnnnnnnnnnnnnnnnnnnnnnnnnnnnnnnnnnnnnnnnnnnnnnnnnnnnnnnnnnnnnnnnnnnnnnnnnnnnnnnnnnnnnnnnnnnnnnnnnnnnnnnnnnnnnnnnnnnnnnnnnnnnnnnnnnnnnnnnnnnnnnnnnnnnnnnnnnnnnnnnnnnnnnnnnnnnnnnnnnnnnnnnnnnnnnnnnnnnnnnnnnnnnnnnnnnnnnnnnnnnnnnnnnnnnnnnnnnnnnnnnnnnnnnnnnnnnnnnnnnnnnnnnnnnnnnnnnnnnnnnnnnnnnnnnnnnnnnnnnnnnnnnnnnnnnnnnnnnnnnnnnnnnnnnnnnnnnnnnnnnnnnnnnnnnnnnnnnnnnnnnnnnnnnnnnnnnnnnnnnnnnnnnnnnnnnnnnnnnnnnnnnnnnnnnnnnnnnnnnnnnnnnnnnnnnnnnnnnnnnnnnnnnnnnnnnnnnnnnnnnnnnnnnnnnnnnnnnnnnnnnnnnnnnnnnnnnnnnnnnnnnnnnnnnnnnnnnnnnnnnnnnnnnnnnnnnnnnnnnnnnnnnnnnnnnnnnnnnnnnnnnnnnnnnnnnnnnnnnnnnnnnnnnnnnnnnnnnnnnnnnnnnnnnnnnnnnnnnnnnnnnnnnnnnnnnnnnnnnnnnnnnnnnnnnnnnnnnnnnnnnnnnnnnnnnnnnnnnnnnnnnnnnnnnnnnnnnnnnnnnnnnnnnnnnnnnnnnnnnnnnnnnnnnnnnnnnnnnnnnnnnnnnnnnnnnnnnnnnnnnnnnnnnnnnnnnnnnnnnnnnnnnnnnnnnnnnnnnnnnnnnnnnnnnnnnnnnnnnnnnngatcacctattgaaaaatatgttatagttttctgactaaactcatcaaggctagtgtttacgtaggtagtcaattagttttaagacccaggagaaatgtccctttcatcaatcatgtgcctcatattcgtgttccttatgagggaaattaatctgcacagctcctctaaattcttcattttattataattagctatttatttttatctgttcttaaaattgtggaaagtggctcagaactatcttccttaagattctttttatacttggctgggtgcggtggctcacgcctgtaaatcccagcactttgggaggctgaggcgggtggatcacgaggtcaggaggtcgagaccatcctggctaacacggtgaaaccctgtctctactaaaaatacaaaaaaattagccgggcgtggtggcgggcgcctgtaatcccagctactcgggaggctgaggcaggagaatggcgtgaacccgggaggcggagcttgcagtgagccgagatcgagccactgcactccagctgggtgagagagagactctgtctcaagaaaaaaaaaaaaaaaagattctttttatacttgaaagccttagagtaggatttctacctagctttcaggcaaggaagccaattggacaaaagcaaatgttgcaagaagccaaattcactgagtctacctattgtaggtttaattgttttaagtggaatgttgtattttagtgactaatatatagtttctcaaaataaggtaaattaagagtaggcagaagaatcctaaaaatgctaaaagtctggcaaaagagaagtataaacttctcatatggaaaactatttttgcatcccctcaaattggtatttatatgtaacaggattttttcaatttcttctgttgctgtctggatggttttaaacgacgctttctattttttcacatttatctatgttttttttttttgatggagtttcattcttgtcgcccaggctggagtgcagtggtgcaatctcagcttactgcaacctccacctcccaggttcaagcaattctcctgcctcagcctctctagtagctgagattacaggcgcctgacaccatgcctggctaattttttttttttttttttttttgtatttttagtagagatcgggtttcagcatgttggccaggctggtcttgaactcctgacctcaggtgatccgcctgcctgggcctcccaaagtgctgggattacaggcatgagccaccgcgcccggccacatttatctatttttaattgattattagtcatttcctagtatattaagcaatccaaaaattttaaaacttaaatgtttaaatggaataaaaattgctggtgggaatgtataatacaaccactatggagattccttaaagaactaaaagtagaactaccatttgatccagcaatcccactgctgggtatctacccagaggaaaagaagtcattatacgaaaaagatgcttgcacacgcatgtttatagcagcacaattcgcaattgcaaaaatgtggaaccaacccaaatggccatcaatcaagtagtggataaataaagtgtggggtgtgtgtgtatatgtgtgtgtgtatatatatgtatatatgtgtgtgtgtatatatatctatttcatcatatatatgatggaatactactcagccataaaaaggagtgaattaatggcatttgcagcaacctcgatgatattgaagaccattattgtaagtgaagtaactcaggaatggaaaaccaaacattgtatgctctcactcataaatgggagctaagctatgaggatcaaaaagcataagaatgacacaatggactttggggactcagggggaaagggtgggaagggggtgagggataaaagactacaaattgggtgcagggtatactgcttgggtgatgggtgcactgaaacctcacaaaccaccacttgagaacttactcatgtaactaaataccacctgttccctgaataacccatggaaataaaaaatttttaaaaaatgaaaaaaaattaaatagaaattaaattaaactaaattaaacttaaataagtacaagtaaaattttaaatacaaattcaaaaatagatcaaataaataagaatttaaataacaattgagttaaaatttatattaaatatttaaatttaaattcaaaagcaaaaagcaacaaattgctaaaacaattccatcatatgatttgattatatatctgtacatatatgtataaataaaaaatatatatgtataatacatatgtaggtgagatatgttgaatgatttgacatgagaggtaaaatcatataaagtagtgaaaagggagtttggaaggccagaagggacatatgaagggttaaatgagtggtagctcatctttaaaatatattaactataagtatgaaattggacttgaaggattaaaaaaataaattggttaaaacttctaaaaatgctgaaagataactgtaaatgaaagtacattaaaatattttaaaaatttagtttaaactgaaaagtaattctgatatgattattgataatgaaatatgtagttctaaatgtatttaatgtgctttattaattattaaatagattgtataggaaatgcacatgtaacctattatcagatactaaggtggaatagttctgttaaagctgtttaaatagtccttggaacactctaaatgccatttaaaaaataaatcagaaaatttatgtattgcctttgatgaattaacagagccattatgtgtgtgtgcatgtgtgagtttgtgtgtttcaaatctggctatttcttacctctcttcccttaaccattgcgttctgaccaatgaagagaagagcagatttagtattttccattttagtgctataattctgttaatgcagcgcctgtttggttcccaagtgacatgtgtcttatcttagctttcgttccactgatactgccacatatttttcactagaactgatgttaatcaaactttctctgattctgctgttgtgcagctgatctttttttgaacctaagtactagatttttcccctggttacattttatcttgttttgtaaattatgttgtattgtttgttatgtattagttaagtctgctctgctttactggaaacctcttgtcaaatcaaggatgcggcttctaccttagtccactgcaaaaataagtaaaaaagaagagtcaagttgatataggccataagcaggtccagctcacatacaggccaagagtagaggtttaagtttgttggtcggaacagggaacacatgttgcatgaaatgcaaataataaagaagatacagaactccaagagtgattattaatgtacactctggaacctccatatctaaatgagcattcgtctttgggaagatccatcttggaagcttaaatgtaagttctaattaagctaaacttgctcaagagtttcagagtcactcttaaaagttccttcagaaggaggaacagaagtaacaagaaagaagaggtcttagaggtgccaatttgaggagatcttaagtttcccaaagaggctattgaagttccaaattaccctcagcaaaattgtaccaacaagaaggaggtggacagagttggtggagcatatagtgagcaggggttcaagaaagggggctcagtcaattgagaagctcctatgggagatgaaggatcagataaagaaaacagagagacctcacaaagtgccagaaaaaaattttcagcccaggtagtcaggaagtaaattcctactcaaaagaaacagccatgaaaaatcttccagtcctgcaggtacctttctaacaaagaagcccagacctctaacccagcttctgcttgtctgggactctaacctaacttcttacagagaaacctaggaccctaaccctatgcttgacagataactcatatctaataagtattgattatgctaaccaaactgatatggcacttgtattcccatgccactacacagaggtgctgcagtatatcctaatatatattttataaatcattattttaaaaagttccttcacagccagcttacaagtaacaataaaattagcctttgctgtgagaaaataaaaagcaaaattgtgaaaaacagcaaaataaaatatatcaggaatactttctaaaattaatgtaccttgaattctggtactccaggaaaagcagctttcatcagaagaaaatatggaggtagtcaaagtctttcgtcaaattctgaagggggcttctaagcactttcaagagttttcaagattggcgttcttggctttttattatatctaagtccacttcaaatctcaatagcatttattttctttgataaagtgattctaactcctcttctgtttgatgtggataatcttaaagtttttctccagttctagaatgctttgttttgtaataagaagcaaattatataatcagtgggttttttggagatcctgaatggcattgggcagtaaagcaggggatgaatatgggagtgaggagaatgaaaaagagggaggagggataaaggaggggcgagggaggagggggaggggagatggagggggagagggagcaagaatgtgcacaaataaaggttttttattaaaggtcaccagaagggagttggaaatgaaaaagaatgaagaagagaatgtgattggaaaggatgcatatgagaagcaaatgtctatagttaactgggctgcaagaagagttaattgggtgggaagggaaaggcaaggtggattggaaagaaggaggaagatgggccaagaaacctcacattagacactgctccacattagacaccaaagaccaaacaaatcagatgagttttagctgcttcttggcattggagagaggaggggaaaggaaacagtgggtatccatgtatttttatgtactggtcaaatccaatgttcattaattgagtcatgaatgcattatttgttttcagatatcacattgagaaacctcataatggaagcatagcattaagcattataaaatagaataacacagacattaatgaagcccctgcatcagacagaggtattgtaagattctttccacctgtcaagggattgtaataaatgggaccctacaagctagccttggccttcctgaagatcagcaatcttatggattctttgttgtgggtaatgagacccaagaatgtcagcatatatattaagattgattgaaaaccaggtgacctcagggacaaaggcatttcttttgctaatttaatcagtaatagtttcaaaggcttttaaacctcaggttcctacacaaacagctcctgccaggtagataacagagggagcctgttctcttttgaatacttagccatgaattacaagcatcagttggacagaagagattgaattcctataggtactatccagatcataaaaaggtattaaggcttgccctctattcctgctccatcagcatgaagagaggtttctaagagtcttaactcacaaaaaaagcaattcaccattttgttcaaagcaaaatcataaccataaattgctcttacgtagcagtttgtgcctttttgtctgtttgatcttgataataccactattctgtttgatcttgataatatgccaaggtaggggcaggcaagtttctaaaataaagtcatgaaattttaaaacattaagtggttaatctaaggtcattctgagcaagttagttacagaatccagacagagtgtagaaggcttgatgcctattccagtattcaggacagtcagaatatccaatgtcaggcttctcatcagaattcaatttttatttcattttatttgaattaagttcttgcaacggtgatgaaaaaaggcatccaattcaaccacacacaattattgctcacctaaagtgttctaaatgctactttggggttacattacaataaactagacacagtccttaactttaagtttattgtccagaatgagagataagaaaacagaaaaagaggtcaggtgtggtggctcatgtctgtaatcctggcactttgggaggctcaggtgggaagatcactcgagtccatgagttcaagaccagcctgggcaacatggtgagacccctgtgtctacaaaaaatttaaaaactagctgggcatggtggtgcactcctgtagtcccaggctgggcgacaatgcatgacccagtttctaaaaaagttttaaaaataaaaaaaagaaaacaggaaaataaacagttaaatgagttaagttttccaggtggagaatgtggcaactggtataccagcttatttgcttacttccaatgatttactctctttctatatatattaagcagctactatctgccatgtactgtactcctctgtgctgggaatgcatagatggaaaggtacgtgattccttctctctaaaatctctgggaaataaatacatatggaaatagccaaaggctttgcaacgaggttatttctagggcaaagaaatgtacacacaaggagcaacaggatcacagagaaaggagctgtcaagtctacctggggagtgaggcaaggtttcactgaggaaaaatctgcctggagaagttacgtacttattttatttgtttgtttatttatttattttttttgagacgagtctctctgtcgcccaggctggagtgcagtggcactattgtggctcactgcaagtccgcctcccaggttcacgccattctcctgcctcagcctcctgagtagctgggactacaggcgcccgccaccatgcccggctaatttttttgtatttttagtagagacgggtttcaccgtgttagccaggatggtctcgatctcctgacctcgtgattcgcccgcctcggcctcccaaagtgctgggattacaggcttgagccaccacaccaggcctttttttctttatattcttattatataagctcttttcttttcttttcttttctttttttttttaacggagtttcactcttgttgcccaggccggagtgcggtggcgcgatcttggctcattgcaacctccacctcccaggttcaagtgattctcctgcctcagcctcctgagtagctgggattacaggcatgtgccaccacgcctggctaatttttgtatttttagtagagacggggtttcaccatgttggtcaggctggtgttgaactcctgacctcgtgatctacccgcctcagcttcccaaatctattctttttaactttttaaactttttttgcttaaaaatgaagacaaacatgcacattagcctaggcctacacagggttaggaacgtcaatatcaccgtcttacacctttacatcttgttctgctggaaggtcttcagaggcaataacatgcgtggtgctgtcatctcctatgataatgccttcttccgaaatacctcctgaaggacctgcctaaggctgttttacagttaacttttttttctttaataagtagaaggtgtatactttaaaataaaaagcatagtataataaatacataaactggtaacataatttcttatcattatgaagtattatgtactgtacataattgtatgtgctagacttctatacgactggcagtacagcaggtttgtttaacccagcatcaccccagacacgtgaggaatgtgttgagctatgacattatggcagccatgaggtcagtaggtgataggaatttttcagctccattataatcttatgggaccaccatcgtatatgtggtccattgttgaccaaaaagtcattatatggtgcatgaccgtatatatgagatatatatatattaataaatatctgtttgtttatctcttgttaatgtgtctcttgtaacagggtcccagcctggaattgaaaagagtagaaggaaaagggatttctttctcttccctacattaccttacatggcaaaaaggtctttgcagatgtaattaagttaaggctcttgagatagaaagatgatcctggattattcaggcgggcccaatgtcatcacaaaggtattttaagggtgaggcaggaaggtcggggtagagaaagagatatgatgacagaagcagtagttagagagatttaaagacaccttagtgttggtcttgaaaatggaggaaggcaccaagaaccaaggaatacaggtgaccactagaagctggaaaaggccaggaaacagattctcccctagagcatccagaaggaaggcagtaatgccaagctattttggatctcttgttatgttttaagccactaaatttgtattaatctgtaacagtgtcaataggaaactaatacaagagcaaacagagaaataaagaattaagttttacatgttgagtttgagtgcctgtggtgtacccacttggaattcaaaccaaacgagagtaaaacatattgaattcagagtgtgcagcacataggtcatggcagatgccaaggggatggaaggggttatcaccttccatctagttctagcaagaactagaaagcagctggggtcacaccctggaaaacagcaactttaaataatttcacaaaggaaaatggtaagcaaaagaaatgagaaagagcagtccaagaagtggaaggaatttttaattttttttagacaaggtctcactctgtcacccaggctagagtagtgtgatcatggctgtctgcagcctcaacctcccaggcttggtggattctctcacctcagcttcccgagtagctgggactacaggcatgcactaccacacctggataactttttgtagagacgaggtctccccgtgttgtccaggttggttttgaactcctgggctcaagtaattctcctgccttggcctcccaaagtgctgggattacaggcatgaaccaccacgcctggcgaggtaggaaactttgagaaggccatataataaaaacctgggtgaggtagatagaaaggaattgtcagaaaagttaagtctatttcgaggtcagttgggaaaagctcagagaagaggacattggattggacaatatggcaggttttcaataatgtgggcaaaagtagctccagtaaagctgtgggatgaaagccagataaggtagaagagtgaatggaaggtaggggaagtggagacaatgatagtccataatttctagaatgcaaccagatttctcttgaaagctgggtgagcaacagggctaaagctggaaggattgaggaagaggtatatgagtacttgcttgtttgcttattttggaagttggaggttattggagcatgttgcaggctgaggggtaaagatagtaaaatgtgaggatcaagactgggctctcgggaagcctcaattttaagagcaacaatttctagagagtcctatttttcttttctttgttttttttttgagatggagtcttgctctgttgcccaggctggagggcagtggtgtgatcttggctcactgcatcctccgcctcccaggttcccaggttcaagcgattctcctgcctcagcctcctgagtagctgagactacaggtgcaggccaccacgcccagctaacttttgtatttttagtagatacggggtttcaccatgttggccaggctggtctcgatctcctgacctcaggtgatctgcttgtgtcagcctcccaaagtgccaggattataggcatgagacaccatgccaggccagagagcccttctttattcatgtactcataacatgagcccagctcctaatagtctttcaagtgtccattagctgagaaaattagatatcctctccatcctgtggctttcagaatttatctcattaatttctatccatcaccagggctctgatggtgggaggggtgtggaggtgtggagaattgaaagtagggattgtatttgtatacactgcaggcagcatcagaaagaagtaaaaagcttgatctaggcacttagtcctaaatagagagataaatcttttaaattgttttgggagttaagctaaactaattgttgaaacattaatttcagccaggagtatatttttaaatagagttgggaagaagagaagcaatgactccaaccagactcaaagaaacacagatgaaagaagtgacaatgcatttctgagttcctttacaccagattgtgtgtttacagctgcggtccccaaacttcttggcaccagggaccagttttgtggaagacaatttttccatagatgtggtggtagggggatggtttcaagatgaaactgttccacctcagatcatcaggcattagttagattctcataaggagtgcgcaccctagatctctcttgtgcgcagttcacaatagggttcacacttctatgagaatccaatgctgcagctgatctgacaggaggcagggctcaggcggtaatgcttgctggcctgccactcacatcctgctgtgtggcccagttcctaacaggccatggaccagtaccggaggttggggacccctggtttacagtttaagctgagaattaagaattgaagtggcttaaataagtgaaggggaaaaagagaatcaagcttttgcctgagttaatcaaaatgacgttctaaaatatcaaatctcctttagtttgtgaatatgtgggttttcagtgatggaaatgaacaatgaatgcactttccacttttaaaaaagtgtaaggagtaagagttatatatgaaataaaatctcctttcctagcttcatgggaatttgcctcaaacacctagggaagtgatatccccagagtataccttgtgatgtgcaggctccttgaaaataatattcttaagatggtgacctcaaagaaagagggctcacattgctgtttgtaggtttaaatttgataaatgtgttatggatattgaacacgaaagaaaaacagcaaattcattttagtgacctgagaatatttctcagagtctttctagtgcatcatatgacattaattcattgttgctgaagtccccaaatattctataactcttgtcaagttcaaaggtaatttcaaacccacatttgcttttgtgggtttaaaatagcagctttctaatgacttccatcactacacctctacatgtaaagaagtggtatttaggatgatcttttggatcactggtaatacattccaatatgtttgattagtgttattagttgttcttggagatatgattttccatatgtaaagcaatagtacattttcaaaatatcaaaagattaagttgttctataaagctctaaaggtgttttaagaactctggaccacttctatatctgcaagtagtacagtacttttcctaatacagtacattggattgctcgaaaatcatttatctttgccattttaaatgcccatctcacatgcaaataatctgtgtatgagtcactcacccatcaggatgcttttttgtgtgtggaacaatgacttataaagtacacctctgaaacacgagtccacacagatgaatgaagcataaattcggcctcagggataacaaaagaatttgcatctgcatctcagcgtaaagtgattcaggtgcttcttgaatttcatattttggttaatgacattgccaccctgtcaattgctcaggatcgaaaccaccaagtcatcatgaaatctcttttcttcctcacaccccacatccaattagctgcccaatcctgttaattctatgacctcaatgtgtttggcatctgacccttcctgtctgccgcccttagttcctcctgcctggattttgtcatggccttggaattggtctccctggcttgggcagcatcctttcttcgttacttctctccattgccaccttgtttctcttcctatgatttagattacatcattttcttcctcaaaagatgcgaggaattgctattaccaacagcatgaagtgcaggatcctcaggccgatattcagattacaacagtgtagcccatgggccagtgtggtcagtgaaccccttggtatggttcatgatggagatacatagagaaatagggagtagtcattaagaaactttcctaggcattcttttattttttcccacatttgttctgattatattattgagatgtaattatgcagctgttgaatctagtaatatagttttaaaattttgtagcttttaaaataattttttatactttttctagtaatttacttttactgctgaaaaatatatgtatcagtatatgatcaatcaaaaatttaaaacagtaatcatttgggaagcactgttcaaactgtggccctgcccggcagcatcaacatcacttgggagcttgttagacaagcagaattgcaagtcctaccccagaactacatacacagaatttctgggggtaggtgccagcacttggtgttttaacaagctctccaggtgcatgctaaagtttgagatacactgatcaacaatctttccaccacttcttggacactccctagcccctgatggctattaagcacttgaaatgttgctagcgtgactgagaaactgaatttttagctgtatttaatttaattcaaatctgaatagccatattggacagctagtggctggccatactggacagtacagtaatgggagttctgttcccattactacattcttaaatagacagccacagtgtcatcttggtgccgtatttcaagattttcagtttatctaggaatatttgttctccaacccccgcactttcataccagtctattaaatttatccattttttaatgtaaatctctattttcacctcttccaagaagacctgcaggaccatccttatttaaatttacttccctccttgttttcctcatcacctttttttctaattctcttatagaacttattatgctcttctttgtacctaagttacttggggatgagtttgcctcccccagatggagagctgttggcttaattgtccttctatcacgcaacagcatctagctggtactttgcaaatgcgagacacccaacaaccatgtaattgaattaaatgtacaggaaaccagaaagaaaagtcctcaacaccaacaatacatcctagtgttcttagaagttgagacagatcagaatgttaacatacacaatttagtttagaataggaaaaatgttaaagctatggtgaaacatttgtcacaggatcaaaatacattgttataaaaataaacacagtgcctgcttcatcatttctttagcagcaggaaagcattttcctttggcaatcctctacctccatcaaaattgttccttaactaaatgtgagattaaaaacagacttgtagctcttttttttaaaaaaaaaaatggcactcctattggcagaaagatattcttgctgatataaaagcagctttcccatcaactggatgaaaaatttttgacttcaaaatagatcaatattttgctacaaataaaaaatatttattttttataaaaagaataaaatacaattcattctgctttatttcagagttctctactttatcccgtttttacatagctataaaattaaaatacatgaaagtaaccacaccaaaccaaacattaaggtggttaataattaagtatattctgccatcagtgtaataaacctcattagatttttatagggattacatacccacactgactcacaaatacagaactccaaagaacttacacttcacaatgccttcacacaaaagtgaatgggaaacgtatgttactttccaacaatgggcaatggcagcattcatatgagatttgaaaacctgaatgtcaaatacaattgacggttttctatgtgcctttcattatgggaactcaccaactaacatcaatgccaactcctcttacaagttgtattttcttttttttttttttttttttgagacagagtctcactctgtcagtcagactggagtgcagtgggacaatctcggctcactgcaacctccgcctcctgggctcaagcaattctcctgcctcagcctcccgagtacctgggattacaggcgcatgccaccacgcccggctaatttttgtatttttagtagagacggggtttcaccatattgaccaggctggtcttgaactcctgacctctggtaatccgcctgcctcggcctcccaaattgctgggattacaggtgtaagccaccgcacctggcctacgagttgtattttcaaaatttttagattgtctgatagtgccattgtgaaaaacacaagtgtattgatgggacgcatctcaaaataataggagctatctatgacaaacccacagccaatatcatactgaatgagcaaaaactggaagcattccctttgaaaactggcacaagacagggatgccctctctcaccactcctattcaacatagtgttggaagttctggccagggcagtcaggcagaagagggtattcaattaggaaaagaggaagtcaaattgtccctgtttgcagatgacatgattgtatatctagaaaaccccatcgtctcagcccaaaatctccttaagctattaggcaacttcagcaaagtctcaggatacaaaatcaatgtgcaaaacccacaagcattcttatacaccaataacagacaaacagagagccaaatcatgagtgaactcccattcacaattgcttcaaagagaataaaatacctaggaatccaacttacaagggatgtgaaggacctcttcaaggagaactacaaaccactgctcaatgaaataaaagaggacacaaacaaatggaagaacattccatgctcatgggtaggaagaatcaatatcatgaaaatggtcatactgcccaaggtaatttatagattcaatgccatccccatcaagctaccaatgactttcttcaaagaattggaaaaaattactttaaagttcatatggaaccaaaaaagagcccgcatcaccaagtcaatcctaagccaaaagaacaaagctggaggcatcacgctacctgacttcaaactatactacaaggctacagcaaccaaaacagcatggtactggtaccaaaacagagatatagaccaatggaacagaacagagccctcagaaataatgccgcatatctacaaccatctgatctttgacaaacctgacaaaaacaagaaatggggaaaggattccctatttaataaatggtgctgggaaaactggctagccatatgtagaaagctgaaactggatcccttccttacgccttatacaaaaattaattcaagatggattaaagatttaaatgttagacctaaaaccataaaaaccctagaagaaaacctaggtattaccattcaggacataggcatgggcaaggacttcatgtctaaaacaccaaaagcaatggcaacaaaagccaaaattgacaaatggcatctaattaaactcaagagcttctgcacagcaaaagaaactaccatcagagtgaacaggcaacctacagaatgggagaaaatttttgcaatctactcacctgacaaagggctaatatccagaatctacaatgaactcaaacaaatttacaagaaaaaaacaaacaaccccatcaaaaagtgggtgaaggatatgaacagacacttctcaaaagaagacatttattcagccaaaagacacatgaaaaaatgctcatcatcactggccatcagagaaatgcaaatcaaaaccacaatgagataccatctcacaccagttagaatggcaatcattaaaaagtcaggaaacaacaggtgctggagaggatgtggagaaataggaacacttttacactgttggtaggactgtaaactagttcaaccattgtggaagtcagtgtggcgattcctcagggatctacaactagaaataccatttgacccagccatcccattactgggtatatacccaaaggattataaatcatgctggtataaagacacatgcacatgtatgtttattgtggcactattcacaatagcaaagacttggaaccaacccaaatgtgcaacaatgatagactggatgaaaaaaatgtggcccatatacaccatggaatactatgcagccataaaaaggatgagttcatgtcatttgtagggacatggatgaagctggaaaccatcattctgagcaaactatcacaaggacaaaaaaccaaacaccacatgttctcactcataggtgggaattgaacaatgagaacacatggacacaggaaggggaacatcacacaccggggcctgttgtggggtggggggaggggggagggatagcattaggagatatacctaatgttaaatgacgagttaatgggtgcagcacaccaacatggcacatgtggcacatgtatacatatgtaactaacctgcacgttgtgcacatgtaccctaaaacttaaagtaaaaaaaaaaaaatagaaaaatacaagtgtaattcaacaagctcccagagtccacacaacacatatgatgttctcaaactgttctaagacagtaggaaaagatacaggtttattgtggacagttaacttagacaaggaataggctggtaagtctaaaaaagggacactatatttatctcaataacctaccatttattagaaaatgatggcaaaattttttaagactgaaaaaagataccacagtagaaaatacataatcctagctatgttaaaaacaaatgtatgttaaagcatataaaattaactgaaacaccaaactgttaaaactggtttcccttgagtgcgtagtaatagtgggggtaatgagggatctattttttttaaatgaatctactttatatatttttttaaatttgaatattgtataataagaatgtttccacgtactacttgcataaccaaaagaattattttaagaaaattaaaaccactctcttttcttttgttttttctttttttcttttcttttctctttcccctcccctcccctcccctcccctcccctcccctcccctcccctcccctcctctcttctcttctcttcttttccttcttttctttttaaaatagagacaagatctcactatattgcccaggctggtctcccgggctcaaacaatcctctcggctaagcctcccaaagtgctgggattacaggtctgagccactgcacccggcccaaaaaccacttctatctaaagaaaggcaaaaaaccacttttcttcctaacaggaatttccccccctaaaatgtagtataaatgcaagttaaacaacttaaaaaaataaacaactttttaaggaagacataaaaatcaaacaggactccctaatgacctctgattgactcttattaatgataataaatgttgatataatgctttacagtttagaatttgccctttacattcattatcacagttcttaatttaatggtgaaataggtatcaccatcatcattttacagatgaggaaactgaaattcaggcatgttataccttttggctgatatcacccaggttgccagaatttgatccaaattttggttcaaaagctcagatgtcagctgtcacatttcctcagttgaaggagatacagatcagagaaactgattagcagaatctgactagagaagttaatccagacaattagtgactttgtaaagtgtaatggatttatttaaattatgtataaaatagtaatattttatgcagcttggaaagtctctaataacttccttccatactctttctagtgatcttatccttaattagagtaatcaccagtgagagaatgacttaagtttccttgaatcctaatcccatgttcatggttgtgtcacctttaagatctattcattgttcattcacttttcctgcaaatatgtattgatctcctaatatgttgcttattgtgttcatagcaaatgcagtcagggagaagaatgaagcaccatctctgttttcagggaattccaaatccctgggaaaataggtgcaaaataataaacccacgtggcaaaaagaaaatcaacaccattgtatgtgccaaactgcagtggttcccaactggggtgggggtggggtactgtgccacccagggattttcagcaatacctggagacattttggttgtcatagtttgggggtggatgttactggcatgtaatgggtagaggctaggaatgctgctaaacacctagagggcaaaggacagcccacaacagagaattatcaggccccaaatgccagtagtgccaaggtttagaaatcgtttgctaaggatatcatcctttccagattttaaataaagaagttcagtcggatgtggcggcttacgcctgtaatcccagtattttgggaggccgaggcgggaggatcacttgagtccaggagtttgagaccaacctgggcaacatggtgaaaccttgtctctaccaaaacaaaaacaaaaacaaaaacaaaaaccaaaaaacaaaaacaaagcaaacacaaaacaaataaacaaaaaaaatcagccaggtgtggtggtgcgtgcctgtggttccagctattcgggaggctgaggtgggaggattgcctcagccttagagatcagagctgcagtgagccgtaattgcgctactgcaccccagcccgggtgacagaccaagaccctgtataaataaataaataaataaataaagtctatgctggctaaactacagaggaatttacaattatatgacaatgaatagattaaaaatgtaagtaatctactcttgaataaatgctcttatcttattttacatctgtcagtgaaattaagacaaagtgcaatcatgcaccacataacaatgttttgatcagtgagggactgcatatatgacatgttcccataagattacaatagagctgccctttacaggtgtaccatttttaatcttatataccatattcgtactgtatctgttctatgtttagatacacaaataccattgtgttacagttgcctgcagtattcagtacagtcacatgctgtgcaggtttgtatcctaggagcaataggctctaccatacagcctaggtgtgtagcaggctgcaccatctaggtttgtgtaagttcactctatgttcgcacaatcatagaattgcctaatgatgcatttctcagaacgcagtctcgtcgttaagtgacacatgactgtgcaatctttctggaagtggcctaataatacctaagtaggtagggtgggggattccacattataggggaacgagttcatcattcttctgccccacccttgactgagccctcactgtttctctccagactgctgcacaccaggatcagattgcctcctgttcagccctctttaacagatccccactgctctggggataacaatcaaacttgcttcaacaactacatggcatcgatgacctggaccctgcctacctcatcctctcaccttgttcaccttgccttagccacagtgatccccaaatcattttccctgcacagagattccacacagtctgttccctctaactggaaatatcctccccctaccactaaactcttatgtttcgtatcatgacctaaatatcacaccctaaaaaggcttttcttaacttcccatttcctttcctgctctgctttctttttttttcttttcttttgagatggggtctcactctgtcacccaggcagtagtgcagcagctcaatcatatctcaacctcccagacttagcctcccaagtagctgggactatgggtcccaccacgcccaggtaattttttttatttttaattttttgtagagatggggtctcactatgttgcccaggccgtgctctgcttccttatccattttccacccctctctcccctgctgtgtgccccatccccatgtgtcagtgtgactccagcacccttgctgcttggctctaggttgggtttggccattaggcagcattggtaaaaaatctgaaggctgcaggtaatggacatccaggtattttcatccgctttcctacttgggtgccattctgggagtgagttcctcccactagtaccaggactccagctctcagtaagccctggtgccacattctgttcccttattcctacagctgatgcaagtctctgggcaagtcagcatctctcctgtgttcccttaacactgacccacctctgaaagtagccccttcatcaacaaattttcatttgaaccatctaaactgaattttcttttccagtcaacaccctaacattcacattcctcaattttaaatcagtttttcttcatatagattcttccacaacaccaaatcattttccctctgagctcttatcatattttataaatgtatatatacgtgtgtttgtattttgattctttgtgtagtatctgtcacctgacctggcacaattttgtgtattttacagggaacatagttgttttgctaatgacagttgaatggacggatgaaagggtaggcaatatccttgctgaagatagacatctggatctttcataaattattgcttaaaagcaatgttaatataaggaagttatgggtgaatacaacagcatatatgaaggaaaattcttgaagttttaagtgcacgcatgcaggcattcaactgacatttgttcagcaccttgtgagtaccacactcttcattaggcattgggagcacagatgggaaaagaaaacagtctctttcctcaaaggctcaaagactggtggggaagatgagaatgtaaagagaatggggcacatgggaaacatgagccagggctacaaggaggtcaatacagaggttgctatcaaagggggaaggtttacaagggaggcatctggaaatagaaaaaattaaacaagaccatgtttcaagtttgtttagaaaacacgatggctaatatgaccataaagtctttgttgcccctcaaatttgaagaggaaaggaagaaagaagcatccaagccaaataggttgctttgaggtaacgtctcagcccagataaaagggggcagttggcactggcagaaaagcagaagagacaataacaaaaattgactggtgtttactacaagactccagacatgtgggtcctgatcataacgggagtccaaacgggacaatcaccgaagcctgtagctggagctcctggaacccagaaatttctgagtttaggaaggtttaagtaatttacccaccatcaagtttgatacacatgcatgtgtcattgggtggtatgcatgtgtgtgtgtgtgcatgtgtgtgtgtgcttacaatatgatatttgcaatacttcaggtaacagttacatttaccaatagtcttggaatattaaaaatattctaactttttttcattgaaataatatttttaccctctcatatagaggaaaagtgctattttaacaaatgctttcatcatcttcatggttctgtctgtgagcggccccagcccagagaagccaggatgagacacaaatcattctgattaaaaccaaataaacactgaggtcctatcctcagtcagacattagaccagggatcagcaaacttgttataaatattttaagctttgtgagccgtatgatctctgttgcaataagtcaacattattgttttaatgtaaaaccagacatagacaatatgtaaatgaatggggatggccatgttccaataaaactttggttacaaaaataggtggcaagtcacatttggactgtgggctgcagtatgccagccctgcaccagactagaaagaaggaaaggaaaaaatgaactaagaacaagggagacagctccaaaacaaatgggaaaaagaaaaccgtcgatggtaatactgcagtggtacctaaaagagaatattatagttgtaagatccaataaggtaatgagaataaatcaataaactctgactgaccgaacacatattctcccttgtgataaaataacacatattggtagaatgttctacttactataactactatgcaaacaaattcctattttgaaatatataaataaatatatagttcaaaaataggagttaattacaacatgaatgaaccttgaaaacatgctaaatggaagaagccagatggaaaaagccacatattgtatgattccatctatatgaaatgtccagaagaggcaaatccatagagacaaaaagcagcttagtggttgccaggggctagggacggggaagtggggagtgattgctgatgggcacagaatttctttatagggtgatgaaaatgttctgaattaattagtggtgatagttgcagaactctgtgaatatactagacaaccactgaattgtacactttgaaaggatgaatttatggtatgtgagttatatctcaattaaaaaaaggagtaggacattctcatacgatttggcactatctttctggaaggcagtttgaagcagtgcatattaaaagtcctacaaatgtgggaagcaagagagaaataggagctaagaagatttggaaactgaagagcagctgaaaaataaattatttcagtaactgcaatagctccatatacatcaattcaaatacaaaatgggttctattatgtcttgagagcaattaaaaggtaatattttgccttcccacatctgtggaaagtagtcatggacacctgatctgcttatatgagttaacaacagatttgcttggacatcaaatgattattgctgggtgtggactaggagcttttcatacattgctgatccttgccacagttctgcagattatgcattataaagcccattttacagatgagcaaactgattggcaaaggccatgcatcccttctgatctcagcgatctcacgtggatggtgcttctagcaggaggaggatatcagcctgcacctcactccttggacattcctcagctgttttctgttccctgaaaggacattgcaaatgaggccctgcaagcaagttcacaatgtcgccatcccgatttcagccatagcctcccaactggtctccctgctccctctcctgcccacatttgccagagagatctatttaaaactgaaatcagcccatgcccttcccctccttaaaaaaccaagctcctaacccctgtttagaagggcttagaggccccagctccattggctatcacatgggccatatcttgcccttgccctttctgcaccagcctatgggccttcctgtccatcaagccttggaggagcatcctagctcatgcctctgcctggcatgcccttcacatggctgacttgtcattcaggtcacctccacagagactgtccttgtctactgttctaaagtagccacaattcactctattttaatcctttgtaaagctctgaccatctgatattcttccttccatctcatcctcccttcctcttctcttctttcctcctccccttcttgccttgctccctttctccttctcttgctccctccttccctgccacttctctgtccactagaatagaagctgtatgagaacatgaactctgggctgttcacctgcccctggcccattataggcagtcaaatatttgttgaaagaattaatgaatgctgatgaaacttggcaaaggtcctgtgttttgctaaatgatgaaagatataaatcccacagcacatagtcttggctctgtagaagggtaacaataaatgagactaatgaccacaaacttcagaaggccctaacccataccgaccatttacaactgtccccacccccaaggttccatgtctgagacaagtttcagcctgaagtgagtttttattacctactcataaacccctgaatcatgtggtttacagggcaagtgctaatgcagtcataattatattggtgtgaacaaattgtcatagaaatgtagcaaacatagacacaggcatttaagagaaaccagctgctcacaacacaagatcaaccatcacatagaaaccagtcagcaagcacagagctaaggaacttgaactgagtgactgaaggtgacacaccctataaatcacaaagtgtgatgacagtttgcaccagcacctcagagcaaccaatactgcccagagcactatgcattttgaggaaatctataattaagacatggatactaccttccctaaatggtgactgccattctttttctgtttaattaaccgaagcacaaaattaagtgttaacttcagtttgtggacgatttcctttcttttctctttggaagcagatcaaggaacaagaaaggacatgactgcattataaattcattacttacctagggtgttttttttcctttttaatctctaaaataacagttgatccattaagagactggaaggtgaaaaatgtcaagcttctgaccttttcttaatttacacatatactgagccaatgaaaacatatccacaccccatctccccataattagtactttctgtggactcagtgatgactccagagcaggatttctcagcctaggcactattctcatattggatcagataattctctgtgtctgggctgtcctgtgcattgtaggatgttgagcagtattatccctggcctccacccacactggatgccaggagcatcgcaccttctccccccaaaatgtgacattcaaaaatgcctgcagacattgcaaaatgtcccttggaaagaaaaaccacctcaaggttgaaaaccactgttcaaaacattgtgatatgaaaagctaagaaaaaagatcaggttatactctaattatttttgtatttcaacatattctgccacgttttatttcttggacactataaacttgtcaacccagaatggacacttattgtccttttagcatttgttgctgtgtttgagtggtggatgttgctcagtgtcttgctaaaatgccacaaggccaggattgctcttataggacgactccctgacattcatcatagaattttatgctttcatccagcattgcatgccaagattacacttctttaaaaaacaaccagggcctacaaataattgcctctgagactcggcattattttcagttggtggagcaatcttaaaactggtttcaaaccagacatttaaagatcataatatttgtatgaagagttctttaaagagaaagaagagagctggttttagttggaaaccaatgaaaaaacaagtcgtttgtctctgccttttgctaaaataactaactttaatgacaatgtatttagaatagcaaaagcaagagcagaactagccctggcattggccttagaagattttacaactctgaaaaggccattaatcagcaaacaatctataaagacaacctaaaaaaatgtgttccaactgcctcattcccttgccttggttataatccaagagcaaatcctccaagtctaaatctcgtgacccataaaacttcttatctgcctttacttggtacaggccagcaaccaaatctctatacactgtttttcccatggaagaatgaggctgtaagtttgctcaccaagaggcacttggtgggaagaaagaataagcaagaaatctgccataaatcttcatcagccttcttgtgtaaagctgacatggatttagaaaaagtttgttcttcataaactttattatttgcccaggaataattttattctaattgaaaaagtgcattttaaaagctgtcaacaattgtgcatggatttttgacattgtacaggaagctggccaatgtgacacacttgtatggcatagtcacagtataatgtgattttgtttgctttcaaaattttcttgtatggtattttacggttattgattttacaccagatacgtatttgacatgaatggcataatttttttaagggctgtttacagaaagaagaaaattcagtttttttttttcagttttttttttaatgattttttttttgataggttaataaagtgctttgtgtaggccccgcatttttgtttgggccaaagagaaaaacagtcaccacagtccatcaatctgatttgtgattttgctttataccctctactagtagcttgcaccttgtgatctatttaatatcttgcctttcttattaataaaacccaaactaggccttgttcagggtgattggccagaaagaatatgcttcatccgagatggtaggtgcgtacctagcattcttctctaagaacaatatggttcaccacaagtgtggagggtggagtgtgtggaaagtctgggttcccctttctatgcttgaaggggccttttgaggttttattaatgacaatttgaacacacttcttttctatatatctcccatcaatgaattcaacaattgcttggggggcaggttgacattacgaacttagtttaggagaaggtgtctaaatgcttccaaataactttcatgtgatttctaaaataattgatcataaataatgagtatcttatagttataagtcaggaagattaatgatttgaaaacttcttgaataaagtgtggtgttgtctctaccccctgaccctgggcccccatttaaacaaagatacatctatcaacatattttttttgcaaaaatttgggtgctgattttaaagtgacctaatataaattaatccattcaaagtactacatattgaatatctgggaaagccagatatttaccatattctgtcttttattttcagatgtaaaatagttcaaaagctaattatttaaaaagtatggggataaaagtcatatttagagcggggcctaataaattgggcctgtccagcagagcagtcctcttcaattttgcctaaccactcacagagcaattcaccagagtttaacaattcactcagaattttcagtgttgatatcacctccgtttgcataaagaaccaattgactatcaccaccagaatagaaattctacaatgaatgccagtatgtgcattacaacaaatgccagtaagtgatttgccggagtcatgcagccagcaaggggctgaagcagaccttgaagccagccctgtcccagcacatagtcggtgctcctcccactccacctagaagagcaagtcaccatcacaagatggaaggctgctggctcccattgtgaggtcacagagaatggaactactgaaattagacccaggaattgttgaatagaactttccatgccctgatgtcaaagtaaacatatacatgatagatactaaggcattaaggaaatcatgagtcaacagtagtgcttgttaccaaatatagttggtaacaagctgtctccatgagacaagcaaacatgcaaaaacccacgttcgatgcattgttactccttaaaaatctccccagtgcagtccagtcaatcctgttttcttctccagactttgcccatcagctgttctttattatctctgttatttaaatgaacagagagcaggcattgagtagggggctggctttgaaagtgacttcaagtacagtcacagagctgcaaactcagctgctgctgttctgaaacagttattccattttgttatcaatgcttagaccaaagcgggcatggcaggttgctgcatttgcagtggggcattgctgatggggccttgcaaactgtgtctgtgacctgtagggtttctcatgttctcttttcagagcaattattctccaaagctccactccccaaaatgtgtccctgcaggattcctctctctgctctgttcctcactaggttcatatctttgctatagtacttgtcacattgcattaaaacatcttttgactactctgccttgtccacgtgactgggagcctatcaaaagcagatatgttgctcattattttggattgcctaagggtctggcaactgcgtctggcatgtattgatgctcccctcctctctcctagtttgctttatatcctatgaaatgtctcatcagaatcctttaactgttattgattcaagtctctacccagttttgtgacagcaatttagcactttgatctctcaccccattttgcttctgttattaaatttatttttccatgaatttctacttcaagtcggaaagatgaagaagaaaaattctgggctgtgaagtcactagccagctgtgtggcaatggacatctttacccactctgagctcatcagtccccttatttatatttctaaggagagggagtgggaggagaagagaagggaagagaaagtaggaaagaaaagaagggaaggaaggagaaaaagaaagcaagagcgtctgtattgtatggttgttgtaggaattttagagactgtcttttgtaagcaccatcatttaacaggcatttattagatgacagctatccatttttgtgtttctcagtctatcctggggccaaatagaagacacaccacatattggggtaagagaagatggatctttgattctttgtcaccatgatggtatttgtgggtgaattttttttcttcttcatgttgactgtcattggaatttttatgtatagagtaaattcttattatgtctagttcttattggtgttataatcaaccttctaaaatgtctaatattagaaagcagcatggagttgagggcatcagatcaacactcatttcaggcacaacctttttcatcccccctcacctggcaggccaccagtgctaatattactggtacgtggctgatgctactttggtttctgcagacagctcaaatatgaatttcacttgtcctttttccgtttttttcacctcaagcaaataattgacaagcaggctagaatgtcttttaatcacataatggtcctcaaaaattgttttaaaggaagtagtactgagtttagacaaagtaatcaattactgtgtagtacacagaatgtaatgagggacaacaaatactttagagttggaaggcaacttagatttctatttgtgcacataggccatggcatgaggatagcagaaaaatcttatgacactataaggccagatccgagtcctttggtttattttatgaaaatatcatgattggaaaccatgaatcatgtaatgaatgctgggctaatcaatgtgtggttctggtgtgatattacaaaaatcatgacaacttaacatatttctagaacttccaggagatttatggcaaggttgagatacctaacaggctgatctcaatgtagccttaagggaggtgaagggatattaacatgcagtagacactcacacccactatgtgggagaccaacaggtacttttcctatatacttacaactgctaggcaaagccaatatttttattcccatatttcccaaagaagaaatttcccaaaggagacctaaagaagtcaagaaacttacccaaaactagacttattagaagtagccaagcagggatttaaactcatttctggctctagaaatatttttgatttcctagtcttttttttttttattaacaagacgcaaaattccctaattctactacccttcagaccactataaatgctgtggtagatatctccaagatggcaccaaatggtccctgcctccctagtattcacaacttggtatttccctccccttaagtaacttgcttctaacttataggacatggcaacattgaggggaatttatttccataattcatcaaaagacattgtgacattcatcttactagcagactctcaccctagctggctgtgataaagcaagctggcatgttggagaggcccacatggcaaggaattgagggtggtctctgggcaacagtcagtgaggaaatagagccctcagcccaacagcccccaatgaactgagtctgccaacaattacatgagtaagctcgtaagcacgttattccccagtcaggtctccagatgagatcccaggtttagtggatatccggatcacagcctagtgagaccctgatcagaagatgcagttaagctgtgaccagattccttacccacaaaacctgagagataataaatgtgtgatattttaagcctctaagttctgggacaattcattttgcagcagtagacaactaataaaaggaccccacaaaaaggcaattggcttgccacatgtagccaccagtgtgagacccatggaagataatgatgctagtttttgaggtgacagatacctcaactctcctactacattatacgtagaaaattggctaaaaacaatacacgtgaacacactgttccctgggcctaattcctttgctaatttctgtgttagatgcataaaacagagagagtgcaaccaccaggcagagaaacagtgagctaatatgtagatataataaattaatataaatgaacaaagagcaagtacatactgagtgacaggagttttagaaataatttgatttagccaggctggggttagagagaattccagcctaaatagagatgtaaaactagaagatgactgagttattccctcaggaaccattttggtattctggctggttaggggagctctatttgactcagctacatcatcaggaatagttctttgagttagaaagtttctatttttacagagcttttattttttgatgaatggatagtcaggactcagattcaaaaaaaaaaaattctggcccaattacattagtagtacaagaaattatgttatttcccttggctttaaaaagtagtcaaagcttatgtggaagtaaaaaaaaatacttctatttgtttgattttatttctttcttcatttacggattgacctttgtgttcaatatcaatttcattatataaatattagatagaaatgacactgtttgacaatttccatactaatagaaatcacagctttaaacttcataaacaaaatacagagatttataactttctgttccaaggtccataacttattcactatactaagtgaggtctcatcagcactatttctcagtaatcacaatgcagcctttggggttaagtagccctgagtttgggaattctggtcaattcacttactcaccaggtagccttaaccttcctgactctctgttttataatctataaatggggataaatataatgtccttcaaaaatgaaaaaaatgggaaaaggactccatagtcaataaatggtgctgggatagctggctagccatatgcaaaagaatgaaactggacccccacctttcatcatacacaaaaattaactcaagatggaataaagatttaaatgtaagacctcaaactctacaaattatataagaaaacgtaggaaataccctttctgacatcagctttggcaaataatttatggctaagtcttcaaaagcaattgcaacaaaaacaaaaattgacaagtgggacttaattaaactaaagagcttctgtacagcaaaagaaactatcaaccgaggccagcacggtggctcatgcttgtaatcccagcactttgggaggctgaggtgtttcagatcacaaggtcaggagattgagaccatcctggccaacatggtgaaaccccatctctactaaaacacaaaaaattagccaggcatggtggtgcacgcctgtagtcccagctacttgggaggctgaggcagggaaattgcttgaacctgggagatggaggtgacagtgagccgagatcacgccattgcactccagcctggcgaaagagcaagactccatctcaaaaaataaaaaactaaaaacaaaacaaaaacaaacaaacaaaaactatcaaccgagtaaacaaacttacaaaattggagaaaatattcacaaactatgcatctgacaaaggcctaatatccagaatccataaggaacttaaacaactgaacatgtaaaaaaacaaataacccatcaaaaaatggacaaaggacatgaacagacacttctgaaaagagacatacaagcggccaacaaacgtgaaaaaaatgctccatcagagaaatgcaaatcaaaaccacaataagatatcatctcacaccagtcagaatggctattattaaaaagtcaaaaaacaacagatactggcaaggctgcagagaaaaggggatgtttataaactgttgattgttgttgggagtgtaaattagttcagccactgtggaaagcagtttagagatttttcaaagtatttaacagagaactaccatttgacccagcaatcccattactggttatatatcccagggaaaggaaaccatcctacaaaaaagacacgtggatatgtatgttcattacaacattattcacaatagcaaagacatagtataaacctaggtgcctatcaatggtggactggataaagaaaatgtggtacatttacaccatgaaatactatgcagccataaaaagaatggaattatgtcctttgcagcaacatggatgcagctggaggccatcaccctaagtcaattaacataggaacagaaaaccaaataccacatgttctcacttataaatgggagctaaacattgggttcacatatacataaatatgggaacaatagacaccgggtactattataggggagagagagggatgggggcaagggctgaaaatatccctgctggatactatgctcactatctgaatgatgggatcatttgtaccccaaatctcagtgtcacacaataaacccatgcaacgaacctgcacacatactccctgaatctaaaagttgaaattataaaaataaaaaataaaaataaaacaaccatagagatattttagaaagcaaaaatataaataaatataaagttcttgagagagagatttatacataaattaagtgacataagtaagatgcttatattatgcttcatacataataaatagctgttactatattttcttttttttttttttttttgagacagagtcttgatctgtcgcccaggctggagtgcagaggcctgatctcagctcactgcaacctccacctcccaggttcaagcgattctcctgcctcagcctcccaagtagctgggatttccggcatgcaccaccacgcccggctaatttttgtatttttagtagagacggggtttcatcatgttggtcaggctggtgttgaactcctgaccttgtgatctgcccgcttcggcctcccaaagtgctgggattacaggcgtgagccaccatgcccggccagctgttactatattttcaagattttggtattgtctttagttttctgtagtttgaatatgatatggctaggtgtagactctgggtatttattctgcttcatgttctcggaacttcctggatttgtggtttggttcctgttattagttttggaaaattctcagtcattattatttcaaatattcaaatattcaagtatttttttctactcccttctttattcttcttctagtattcccattatgtgtatgttataccttttgtgtttgtaatggtctcactgttcttcaatattctgttcctttttttaattctctttttttggtttgcatttccatttgggaagtttctattggcatgtctttcacctcacagattcttttcttggccatgtacagtctgtggatgaacccatcaaagacattcttcatttctgttacagtgtttgtggcttctataatagcatttccttttgattctttcttagaatatccatttctctgtttacattatccatctgttcttgcacattgtctatttttttctaacagaacctttagcatattaatcatagttagtttaaattctcagtctgataatttcaaaaatgtctaccatatctgaatctggttctaatgcttgctttatctcttcagattgtagtttttcttgccttttagaatgccttgtaatttttttgttgaaagctgggcatgatgtattgggtaatagaaactgaggtacataaataaacctttagtgtgaagttttatgttgatctggctaggggttatgcatgtttactgtttgctgtagctgtaggtgtcataggcttagatttcctcaattatctttgtcctccctcacccattgtatctttacgtttccctagaaactccttcttaaatcgagtttgagtatttccgttattttgcttgtaattcactgtcattatacaggagcactgttgatgtggttataggatgtagggggaggggaagcattctataatcctatgattgggtcttaatcttttattatgcttgtgcccctgggctgtgaccttcacaagtgactctcagcttttatttttcctcttaggtgagacaggaaagctacagagggctggaataaggtaatttttcttctaccaagtcagataaggctctggtaaattcttttcccttgttactgattctttcttttgtaaacaatgctctgggcttatttcaaaatggttactttcatatgtccaaagtgttacttttccttcttgctctggccaagcactaagtaaattttttctaatcttcaccatgagaaccttgtggggggaatcctagaggtaaaacccatgaaaatgttgggatcccactgaaattaggctcccagtagtttttttttgttgttgttgttgttaattttattattattattatactttaagttttagggtacatgtgcacaatgtgctggttagttacatatgtatacatgtgccatgctggtgcgctgcacccactaacttgtcatttagcattaggtatatctcctaatgctatcgctcccccctccccccaccccacaacagtccccagagtgtgatgttccccttcctgtgtccatgtgttctcattgttcaattcccacctatgagtgagaatatgcggtgtttggttttttgttcttgcgatagtttactgagaatgatgatttccaatttcatccatgtccctataaaggacatgaactcatccttttttatggctgcatagtattccatggtgtatatgtgccacattttcttaatccagtctatcattgttggacatctgggttggttccaagtctttgctattgggaatagtgccgcaataaacatatgtgtgcatgtgtctttatagcagcatgatttatagtcctttgggtatatacccagtaatgggagggctgggtcaaatggtatttctagttctagatccctgaggaatcgccacactgacttccacaatggttgaactagtttacagtcccaccaacagtgtaaaagtgttcctatttctccacatcctctccagcacctgttgtttcctgactttttaatgattgccattgtaactggtgtgagatggtatctcattgtggttttgatttgcatttctctgatggccagtgatggtgagcattttttcatgtgttttttggctgcataaatgtcttcttttgacaagtgtctgttcatgtccttcacccactttttgatggggttgtttgtttttttcttgtaaatttgttttgagttcattgtagattctggatattagccctttgtcagatgagtaggttgcgaaaattttctcccattttgtaggttgcctgttcactctgatggtagtttcttttgctgtgcagaagctctttagtttaattagatcccatttgtcaattttggcttttgttgccattgcttttggtgttttagacatgaagtccttgcccatgcctatgtcctgaatggtaatgcctaggttttcttctagggtttttatggttttaggtctatcgtttaagtctttaatccatcttgaattaatttttgtataaggtgtaaggaagcgatccagtttcagcagtagtttttaactacttactaaagctagtccatacttagtgaccagaaattcatcgaagttactatttaagtgttcctactgctattaggcccaatggcttctgcttcaggtaaactgatctatattctctggatttgcttgcctgtgcagtttctggggtggcagtttgtactatgacctcaattctctgaaggatctaagacaagtcattggttttcagtttgttctgcctttttcttgttaagagggcgggattgatgactgacatgctctttacattttggaatgaaaaccagatgtttctgatgttactatattttaaatttatgaataagttacactcttctcaactagaaagatctataaatctagagttatacagctccagttgtccaaatgtgtttctatcagggcacttaagtttttcacattatcagtcagatattattgtatgaaacaatttagaaacatataaacaactgctcctttctggtaactacgaacattactacagttcatttgcaaatattcctttcaactaattgaatggcaactaatgagctaaaataagaaagtaaaatttcctcaaattaaagggaagatggggagggaattattttcctattcagaattaaaaaaaacatttaattagaatactcatttaaaacattagttctgaaggctgggtgcagtagctcacgcctgtaatcccagcacttttggaggccaaggtgagtggatcacctgaggtcaggagttcaagactaacctggccaacatggtgaaaccccgtctctattaaaaatacaaaaaattagctgggcgtggtggcaggcacctgtaatcccagctactcgggaggctgaggcaggagaattgcttgaacttgggaggcggaggttgcagtgagtggagatcatgccattgcactccagcctgggtgacagagcaaggctctgtttcaaaaaaaaaaaattagttctgggaactcttaaataaagacaatgacaaatagcatattggttttctgttgctgcacaacaaattacaacaaatttagcaaaataaaacactttctattagctcacagttctgtaggcttgaagtctggataggctcaactgggttctatgccgagggtttcataaggctgaaattaaaatattggccatcctgggctcttacctggaggctctgggaaagaatccacttccaagatcactcaggttgttgactgaatttagctccttgagttgtaggactgaggtcttcatttccttgcttctgtttgtggagggttgctcagctcctacaggctgcttttccatccttgcacatgacctcttccattttcaaagccagaaatggtacatcaaatctttctcacactttgaatctctatgacttccccttctgccatcagccagaaaatgttctctgcttttatgggctcatgagaccagatggtgtctacccagataatctccctattttaaggtcaactgtgctgtataccttaacataatcatgggagtactacctcataacattcaaaggttccagggattcaggtggaacatttttggaggcacatcctagaacttctgcctactaccagtgggtatccaggtctcctaggataggggaggccagaaacattcagcacattggacactttaacaagaactaggctacttcagtctgcagaacagaagaaaggggtaacaggttctacattcttcaaagactgcatgtagaagaaatgcttatacacgcattcactccacaaacaagattgggttcctgtcaggtgccaacacatgtgtcagatgttggaaatacaaagatgaataagacccatttctgttctcagggagctcacaatctcatgtccagacaggagaggctgaggtgaaagcctctaagatgtccttgtctgatagacttctctagaatgatcctatgctgtccttctctgtgattaaatgatatctgataaccattgaatctcctcctatgatgtccctctctgtaatggtcctctatgatgtccctttgtacgatgcccttatctgtgatgagccgatgatgcatttaatctgtgatgactctatctatgctgtccctctctatgacacttgtctctctagcacccctctctgtggtgctcttcattatggcactcctttctatggcaacccctctctatggagcttctctctctggtgcctctctctatggtgctcctctctatggacccctctctatggtacacctccctatggtacacctccctatggtgctccttttcattatatctatttctaggaaaccatcctctaagaggctggctttaagaagctccactctgactgacaaaaacaagcaatggggaaaggattccctatttaataaacggtgctgggaaaactggctagccatatgtagaaagctgaaactggatcccttccttacaccttatacaaaaattaattcaagatggattaaagacttaaatgtaagacctaaaaccataaaaaccctagaagaaaacctaggcaatactattcaggacataggcatgggcaaggacttcatgtctaaaacaccaaaagcaatggcaacaaaagccaaaattgacaaatgggatctaattaaactaaagagcttccgcacagcaaaagaaactatcatcagagtgaacaggcaacctacagaatgggggaaaaattttgcaatctactcatctgacaaagggctaatatccagaatctacaacgaactcaaacaaacttacaagaaaaaaacaaacaaccccatcaaaaagtgggcgatggatatgaacagacacttctcaaaagaagacatttatgcagccaaaagacacatgaaaaaatgctcatcatcactggccatcagagaaatgcaaatcaaaaccacaatgagataccatctcacaccagttagaatggtgatcattcaaaagtcaggaaacaacaggtgctagagaggatgtggagaaataggaacacttttacactgttggtgggactgtaaactagttcaaccattgtggaagacagtgtggcgattcctcaaggacctagggctagaaataccatttgacccagccatcccattactgggtatatacccaaaggattataaatcatgctgctataaagacacatgcacacatatgtttattgcggcactattcacaatagcaaagacttggaaccaacccaaatgtccatcaacgatagactggattaagaaaatgtggcacatacacaccatggaatactatgcagccataaaaaaggatgagttcatgtcctttgtagggacatggatgaagctggagaccatccttctgagcaaactgtcgcaaggacagaaaaccaaacaccattcactcataggtgggaactgaacaatgagaacacttggacacaggaaggggaacatcacacactggggcctgttgtggggtagggggaggggggagggatagcattaggagatatacctaatataatgttaatgggtgcagcacaccaacatggcacatgtatacatatggaacaaacctgcacgttgtgcacatgtaccctagaacttaaagtataataataaaaaaataataaaaataaaataaaataaaataaaaaagaagctcctctctgagaagccactcttttttttaagtatttttaaagttgtggtaaaatattcataacgtaaaatttaccatttagcccttttaaagtgtacaattcaatgacattaagtacattcacaatgttgtataaccatcattaggtacttctggaagtttctcgtcatcccaaacagaaactgtgttcattagacaagaacttcccactcttccttcccccagctcctggtaatctctgttctactttttatctctatgaatttgcctattctagagaccttttgtaagtggaatcgtacagtatttgtccttttctgcctggcttctttcacttagcataatgtcttcaagttttatagcatgttgtagcatgtgtcagactttcatttcttttaaaggtcctgaataaaattccattgtatgggtatatcacattttatttatccatttatatgtcaatggacacttgggttgctttcactttttggctattgtgaataatgctgctgtgaacactggtgtacaagtgtatgtttgagtccctgctccctgctttctattcttttgggtgtatacctaggagtggaattgctggattatctggtaattttatatttaaattttgaagaaccacaaaactgttttccacagtggctgtacaattttatattcccaccatcaatgcatagagttccaatttctccatgtcctcaccaacgcttgttgttttctctgtgtgtgtgtgtgtgtgtgtgtgtgtgtttgatagtagccatgccattgggtgtgaagtggtagctcattgtgggcttgtttggaagccaccctttaaaatgcttttttctatgacgttcctgtctatgatgtactcctctctgacacccctctttgatatccctctctattattattttttataataccgaccctctctatagtgtccctgtctgtggtgctcctctgtatgatgcccctctctacaattccccttgtgccctttgcattttttcctcctgtatggtccccctatcagtagaatgagctatccttctggggatgatctccttttcctgggggcattcaaacaaaggcaagatggccagcagtcagggttgctgttaaagagatttctgaggtcacttatgactctagcttatgacaacaatgtcatcatcttttcagtgtggctttgagctgttcttccagcatctgagatgtatttgtactgactcattcagacaccttctgtatctgtccttctccatggccagtggcatagtccatgaaaaaattactgagtgcagttcgggttgctgcctttgactgcgtaatttggttttacactcatttctgcttttttaaccatcactttgtatagtagttgctatgagccaaagactgttgtaagcattgcataaatactaacacattgactccatttaattcctgttttacggatgaggaattgaaaccagagaagttgagacacttctgtctgctaacacagtgtgtaagtggagaagctgggattcaaactcaggttgtctggctctcaagcactgagttgaaaggtcaacaaatgttttttgaagattgaccatatgctgggtactagacaaagatacagttcttgtgcttattaaggagtcaggtccagaggaagagagaaatgttcattgatagtgattctgatgcccaggattcatgaaggtgagtggtgagaaatatggctgagaaggtagacaagagctagatggagaaggagagccttgccaggattggactttagaatcatgtaagatcagactaggactgatctgtgatgaaatttccaacaaggtgtagtgaaatgaagaaaatgtaggcaatttaatacattttttcataaagctaaattaatttactataaaaggccgtcctttttcccaagattacatctttcttatattttttgatggcaaaatgtccattcttttgatattttggaggtaagaaggtttttttgttatgtcattaatggttaatttaaagttggcaacccatattaacttctgccattaaaaaataacattagtccctgaaatttgaaaatctgggaatcaatgccataagaaatatcggaacaaagcaatacaaaatatcagtgagaggtcaagtacagtaaaagctaaagtgctgaatagatttggccatgaggaagtcatcagccacattatttgggggcagttttgacagggtgatgcggtgggaggcaggctatggtgggaatgcataagtctcatttatctctaggcgacaaaacttgggtggtcacacagaaaaaatatgtattggctcattacatgtatgtgcttatgttcttctggttgataggctgccacatatttaagacaggtggaaaggaaagagaaatgacaaagaaactaatttaagcgaaggttgttaagcaaaaagattgacagactctaaaattacccactcaacctgatgaaaaaagtattcatcacttttcctctctctctttctctctcccttggtccctctctctctttcagtgatgccaatatcttcctagatcagaaactagatgaacatcagcatcctaaaaatctaagcatctctatgagggatcaaagtcatgttcagggacacatgtcttcaccagcatgcgagtcattccattcttgctctgcctggcccagattgaggaagacatctgagactggactttatgtccgttccagagagtgtacagcatgaaatactgtccttccggctgccagtctgacttggcctgagagaaattgggcgagaagcatgcccaagtctccactgaaccaatgtggagagttaatcacaagttagggcactttggattgaacgttcatctatgatgaactggcaagccactctccctgtgtgttttcccttcagactgtatgatttcagtgcaaaggttgtcttagaacctgaaaacccagaaacattttcaaacctgaattggcctattctcggagactagtgctgagtctactgggataacatcaatctgcaggtttttcccagcactgaagacatagttcatcctataattggaaaataatttgatttatattccattgtgtcagagccttcactcaggtctcttggaggagaggtctaggcagcaggaagatggtctagttttgaaaaaaaaaatgctccatagacacttatggagaaagtgcaaaaatggagcctgagtgatgtttatgaaagaattccaatgcctctttgtagattcccgagttagattgagggatgtgaagcatggagagcccagacacaaaaacagtgtaatgattggcctcccatcctggaacttgcatttgctgggtcctgcctactacatgccaggcacttgacataggagttcattacatcctctcaatgccactgcaaatgggtgtaattatctctatttttctaaagaagagtaaacaaagtccagaaagatgggtaacaaagtccagaaagatgggtaacttggcccaggtcacatagctggcaaatacccaagtgataatttgaacctgaacccaagtctgccttactcttagaccacatcctttcctgtgctccaaaggctgagtttgtaaagtgtgatggatgcctctgctagaagtgcagagtatacaagcagaacaacccaagacacatgctattgattcaggcagttgtactcagggcattttcctgtggagtttatgctggacctactagcatcattttcctcatttttctcagggaatgcctggaaaccaagataattgctcatcagaactactttaggaaacccaagtggcaatgggggaccctcttaacctagaaaattctgggaaattatccctctcatgcagaggttggcaaactttttctctaaagtgtcaggtagtcaatgttttccgcttcatgagtcagaaaaatctctgtcgcaactactcaactctgctgttgtagctcaaaagctgctgcagacaataattcataaatgaatgagtgtggctgtgttccaataaacctttaaggtcactcaagcttgaattttgtataattttcacttgtcacaaaatgttatttccttctaaaatttttttcaaatttaaacatgtaaaaaccattcttagctcacaggccatacaaaagaggtgggcagtgtggatttagcccgcaggccatagtttgccaatccctgctccagaggatcatattttattttatttttccccatatgttagatggtttactctcagaaggtttacaaaagtagacaagaagatctgttgataattaattagtgaaaaactactgaatatagcttgacattttaaatcctattaacaacaatttttggccaccagaatgactcacagtaaacaaaattccttattactttttttaaaaaaactttcttttaattgaaatttcaattgaaataattgtagattcatacacacttgtgagaaataatatatagagaccccttgcacccttcacccaggttccccctatggtaacattttgcaaaataatctaccaattttgtccagatttcttcagttttgcttgtactggtgtgtgtgtgtgtgtgtgtgtgtgcgtgtgtgcataagtgtgtgtgtgcgcatgcatgcacatatttagttatatcactgcaaagatccctgtgttgtcctttcataactatgtccacctccctcctgcccccctatccttagctcctggcaactactaatctgttctttatttctaaaatttggtcatttcaagaatgctacacaaatggaatcatatagtatgtaattttttgacactgacttttcattcagaatattcccctggagattcatccaggttgttgcatgtatcagtagttaattcctttttattcctgcatagcattccatggtaaagattaccattgttggtttaatccttcatttgctgaaggacatttggattgtttctagtttcaggctaacatgaataaagcatctctgaatgtttgtgtgcaggttttttgtgaacatttcatgtccctgggataaatgcccaaaagtgcaatttctggtctatatggtaatttcatttcatatttattactttttaaatattccctttgcacatattttaaaatatgcctttttaacattaccacaaaaacacaccctataacaaatgacaccgtggtaacagctctttaaaaattccctgccatcttgcattctcattttatagacatagcaactctacactagagaacttaactgaccccaaagggtcagtcataagtcacagaatggtcagtgcaagctgagccagaacaagaaatcacttcttccttgtcttccattagtgctcacatctaaacatgctgcaccagtgaaattacagacagaagcagccaacgacatggtgtttctcattatggaagaaagaaaatggtttacttggctcttagggatgtcatgagctcacatgtcctagctacagccttcctcaatggagtcttacgtggcttcttcactcaaaacttgagactgcctcacagcatgggcaagtgacaaggaatagcaaagtgcaaacatgcaaacaatgtttaatatttctccagtgtgactatgggaactggaaaccctaaagctctgtgacacttttcatcagtcccctgggggttatgcagctgtgtggttaacaagttgactatactgatcagagagggttgaactagtattgataaattacaattcctcaaatctaaagcctttcctgacacgttttctaaatggtccaaagaagagtttgtttcatttctacattagacttagcaattggtttcttcagtctactggccatgaccaagaagtgcaggaatcctaccatctttcactccctcctcagaatctaggagccattacaacaatccgtccctacctttaaccagtgctgcagagggaggtctgtggaccaacagcatcagcatcacctgctaacttgttagatgtgcagactctcaggcttcattctcagaatggttgaatgaatttctgtgactgaggcccaccaatctgcttctttcctagctctcactcggagattctgaagctcactaagccactttagaattaatttcaagtatataacagaaaagtaagtcatagtttttaaataaattaataataataataataaaagctcaaccaacaaaatagttccagcccctttctgtcaattacacagtctttatgaggccaatattgatataaacataaaccagagttgttatttctgacattcagcagattgtaactttcttcacgcattcactgtttgtttctaatgaaaatgctcagtttgtgcttctacttagcacctatttaaaattctttatcaaactgtaatttcctcggaggcaggaaacgtgtgtctccatagcctaataaataggtgtctaataaatggttgtttaacaaatgaatggattgtgttttatattacagttgctttgccctccactaaacagtgcacttacaggttggagaagatgagggttttgtttgtgctgggttcccgaagattttctcactatccctaagtatgcagctgacttctctgaatacaataggttcacaaaagttgttggatgcacaacaacaaccaactaaattgcacctttagtgttactgcatagagtccaaataattttaccatggacattatttccatgtacatgtgggaaaaagtaatttagtattgccattttgaatattgtttaagaaacatcattacctataaaatggaacttgagagcatgtttggggaggttcgtgggtgaacaaaggtacctgtgacagatgtacctcctttcaaaagggtttgtcatggaacaatgaaggcaaaaagaggcaatgatactcagccaggtgagccagtgggccccagcatttttactgaaattttctagttaagaaaccaaattacacaggctcattagatgatccaaattccgacattcaggtaggatatttcaagccctttgatgttgaacttttaggtgtatctgccttgttagttattctctatgaatgagagtatctggcacttccacagaaaggtggaaatgacaaataagcacctttgaaggatcagatatgtgtgaaggaaaaacacagtatctgtgctcaagaatctaagataacttagcaaggatgatctgtgctctttaatttttacatatcccatatgaaggatgggaaatgctaagtgttttcctcagtggtcttagttataaaacattacagagggattcaagttttataatccacctttcagcaaaacaaacaaatcatttgtctgtgctttggaatctaagaggaacataaagcaaaattagatatgtttatgataggtagacttcagcaatgaagtaggagtttggaaaactcctacagtcaaccctaggatgacttcaatggatgacttcaacatgattttctttcttttctttttttctctttctttctttctttctttctttctttctttctttctttctttctttctttctttctctctttctttctttctctctctctttcttttcttttttctttctttcttcttttttttttttttttgacagagtcttgctttgtcatccaggttggagtgcagtggtgtgatcttggctcactgctacctctgcctcctgggttaacgtgattctcgtgcttcagccgcctgagtagctgggaatacaggcgtgcgccaccacgcctggcaatttttgtacttttagtagagacggggttttgccatgttggccaggctggtctcgaactcctgacctcaggtgatccgcctgccttggcctcccaaagtgctggggtaacaggcatgagtcaccgcacctggccaacatgattttcttttccatcaaaatgacatttccttgagaatgacaagaagagaaaatggctacaaatattaatttctttcattctatattgctgccatttttgtatatttataagaataagattttgttgttgattagggtttttgctctatcgaaataacatcttcaggacatatatatttcttaaatgactaacatgtttctgatccaagagtacatacaaaactggactgagtataacattatcttccaaataaattttaactttgtgtttaatttgtttaagcatttttcacagaatttgtctccagacaaaactcttaaaagttagttttgagtcaacacgttacaatggttgcctgaaatcactaactattttagtactgttaattcaaattcatttgagcagtatttcacatgcaaagcttcagactcatccagtctcagaatgattctttgaaggcataaagctgtcaattatgaattaaatggacaaggtgatagaaagtaaatgtctaccttcaactctggcaggtcattgtttctacatgctatcagtgtttttcattagctgtattaacaaagacatcttaagtcctgcctaagtccacaggcctctgaaggaagtctaaacaactttgagtgatttggagtggaagcagtactaagcaacaaattcaaaagccttttggtgggcaccctctcccctagaggtggtgtgttttgccagatttgtccttcagagtgacagttccatggttcacaggtttatcaaatactaagccataaccctcaaagagctgggaggggatgatattagccagcatttattgagtgcttcctctgttcagaatactacacatacttcttctaatttagtcttatcaaatgactctgagaggcaggtggtgaaagaaaccaaggttaggaagttaagtgttaggagtaggaagtccagctaacaagtgacacagtagagattctaagttaggtctgtgtagctcaaaagtttatcctcctaacctctgtgccattctgcaggtcatcacagggcattcaatagctagtgatggtggccatggcaaattgaggggtgtgaaaaccagagttattttctacacctttccttagctgggatgggaagcaacacatatatacattgattttattttggtttatttatgaggggataatttgtattgtgtgtacatgtgtacacattctctctctctccctccctccctctttctgtgtgtgtctctctttctctctgtgcacatgcgtgagaaagacagagacagtgagagagagagagagagagagagagaaataatacttagaagtattgaaagtttgaagacctctcatctagtctcttcaactaattaaatgaaattaatttgtattgtaacttatctcccttatgcatacccatctatttgtaacttgagaaagactatattcttaattgttgcattgcaattgttaaatttattgcaaccgaagacatcacatttctctattgcatatttttatctccccagtcatgagacagtggatgtcctttatcctcacctccccctaattgtttccctttggtacacactctttccttccttcaattttcataaattcaatagtcaggacccagagagagcaagaaacaaatagatgctatgtggaataaaaccattacttcctgacacctccatatttgttctttctggtctcttggagtctcccaattagttcttgtcttaattttctggcaaatttcaggaaccctcacaatcttcaaactatcatcttccaatattcttctcttgggaattccctggaaacttcctgccaatatgcaatcctaggacctgagtaagagccatattttattgactatgagagtaatcttccagatggcttattttgtaacattccgcaagctataggactcagtacgtataggcatgtctccccaagcctttctaatcagtgggctaaggagagacattgttctattcattataccatatgccaatcccttctcaaatctgggatcataattgatgggttttcttttttccataggccaagcttttgtttcatggctctcatgttcttgagcagccccattggcctcaagccctcacttaccctaacagttagataatatcacccatcaaggagtcctaaaatgcagtccattgacattaaagtgatagtctttgctgtcctaaagcttatctgtgctggacacatgcacagcctggagggcaaatggattgttcagcagcttgccagggagagataaataagcagtgaaggaaagagcagaccctggcagggcaaaccgaactgggcaaatccataaagctacagccagtgagcaaacaacagcagtcttatattcagtcactggaaatgtgaagtttcttttgacctaatgtgttaatgtgaatctatgattcacacagtcccgaaagacaacacattttgcagcaggccgaggaacttttgttataatgtcatctatggaaaagatcaggaaagcagaaaatatgatctttataatgtttgtgtacctacagggccaattatctattaaacaatcatatagagtgatcatttcagggaaacactaaaagagactttaaaaatagtcagtagattccagtgatttacgtcataaagaaacagaccatcttaagtaacacatggacataaaagcaagcagatgtttgcattctaaccagggcactaatggaggtgctgtggcattgtatcaaagtaaagtttgccatcttcagaattgcccactggagttttaaatacagctgtataactttgagtcaacaacttgtaagcattccccgaccactctgagcatcattctttgctgcaggtaagaattaataattcatcactaacacaccgtgtcaaactcattttctgaaacaggcctgaaatgtgtgattgactataacatgaaaatttgtcataaaaacaattccttgggttgctgaattgtaaacataagttattatgagcaaaatcacagtaaaaataaatgagcaagaccaaactcacaagagactggatttgaaatttcacatgcaagctgtaagcctggcagttaccaactcaagcgttgggtactctgtaaagcttgacagtaggaatggatccagatactatggccttttacctttcttctggagaaatttaaagcatttttataaatattaagccagatactgctcattcaataaatgactcctggaagtatagaagacatttgtggggattaactctttaggccaccaagctatcattcactgcctaagaataatcttttttaaggtagggagagccaaccttttctggaacacctcacagcttagaaggcccagattcttgccactcaagccttttcaagtggggacatttaaaaagaaaattgcacttgcactactattgtggaataggactaattacaaagattaaaacagccttgtcatcttcaggggttagtttcactgggaaaaaccctactaggacactagtactaagtcactcacccgttggctggctgttttggcatgtggactaacaacactccctttgtcttattcttgctttcttctaattgcccactttcacttttgtgctgtttgctcctcctttcgtaaagatacctaaagaacaatatatttttagcatccaccagctcaaacacaatgcccgtgtttgtctcatttcttattttttgatttgttaatgtttacttttcatttcttactttcttctttatttatcctttttgctgatttctttaacttgcaagcatttccccataaacatatttctcaccctttcttttgttttcttcctttctctctctttctctttcagtctccaatattttctagcaatttgtggcttgcctcttcttgatcccttagtcctgcacctgtttgtttgctgggcttttgtttatatatgggagatgggcttggctggagaaagcagtaggtttttgttgctttgggacctcccttcctctaacatctcttgctgatcttttttttctcatttttttttcttttcttttctcccctgacctctctggtcttccacttatcttgtaaattattatacttgatcttaaaaaattatggcattttcgcagtaaccaaaacagcatggtacttgtacaaaaacagacacatagagcaatggaacagaatagagaactcagaagtaaggccacacacctgcaatcatctgatctttgacaaacctgacaaaaacaaacaatgcggaaaggattttctatttaataaatggtgctgggagaactggctagccatatgcagagaactgaaactggaccccttccttataccttatacaaaaatcaactcaagatggattaaagacttaaatgtaaatcccaaaactataaaaactctagaagaaaatctaggcaataccattcaggaaataggcacaggcaaagatttcatgatgaagatgacaaaagcaattgcaacaaaagcaaaaattgacaaatgacatctaattaaagagcttctgcacagaaaaagaaactatcatcagagtgaatagacagcctacagaataagataaaattttttcactctgtccatcctacaaaggtctaatatctagagtctacaaggaacttaaacaaatttacaagaaaaaaacaaagtaagcaaaggacatgaatggacacttctcaaaagaagacatacatgcagccaacaaacatatgaaaaaaagctcaacatcactgatcaagagagaaatgcatattaaaaccataatgagatatcatctcatgccagtcagaatggcaactattaaacagtcaaagaacaacagatgctggcgaggttgtagagaaaaaggaagacttttacactgttggtaggagtgtaaattagttcaaccatcgtggaagacagtgtggcaattcctcaaagatctagaggcagaaataccatttgagtcagcaattccattactgggtatataaccaaaggaatataaataattctgttataaagatacatgcacacttatgttcattgcagcactattcacaatagcaaagacatggaatcaacccaaatgcccatcaatgatagactggataaagaaaatgtggtgcatatacaccatggaatactatgcagccataaaaaggaatgagatcatgtcctttgcagggacatggatggagctggaagccattatcctcagcaaactaattcaggaacagaaaaccaaacactgcatgttctcgcttatacatgctaactgaatgatgagaacacatggacacattatgggggaacgacacacactggggcctgttggggaggtggggggatggagagcatcaagaagaatagctaatgcatgctgggcttaatacctaggtgatgggttgatctgtgtagcaaaccatcacggcacatgtttacctatgtaacaaatctgcacatcctgcacatgtacccctgaacttcaaataaaagttaaagattaaaaagaagtatgacattttattttcttatatctttcatctaacttcaaaaaaagtaaaaaataattaaagcttaccctccttaaaatagaaaaacgttcaaatggacacatacagttgcatgtgtgtgtgtatgtgtgcgtgtgtataatacatatataatatatataaataaaatgtacatagaaatgtatataaatatgaacagtgttgctttatcattgatagtgaccccagtaaataaaacaagaactggttgtactaacaccaatacatggaaataatctactagaactacacaagccatgaaatggtcttggaagcgacaatacagattaattcttttattttggaatatagcaatatgcacatttcattggactcattagtattatgtatttaaatttaaatttaacattgatcaatagcaataaattatatacaacacacacacatatacacaacatattattttattcacagaaggcaggtcatttataaataaacttttgcatagtctaaaactcatatattgatttatgctaccaaaatacagcctgggtaagcagagaaacaaataaaccaaatagacaaatatatataaaataggctgttttagagataacacaggacagattttattaactaatttatgacttacagtctgttggcagaagccttccttctccctaatttcagtctttctgaacaggaaaaacagaccagaaggcttgatggtgtgcaaagctcacatctttatctctgcaagagctttatttgggggtctggaaacagaaattctcaccatttttcattgattgtaatgtttgatatgttttctctttgctgggaccttcactctggatcattctgccaggttccttcattatcttcaaactattggcaaatgatttattggcagtaactatattcatggacaaggtgaactcattttctggcttgacactgtagccctcccttccttctattgcactgtgactccaaaaacacccaggcttgcagcaattactactgcacatactaatcagaagtttctatgaagtgctcctgctttgaactcagcaaagccacagccaagtgggtccttatgaaatgaaaatggcagtccctttgggacatactattccgatttaaaatggacttttaaaaaattgcacttctgtcttgaaatccatttgtgctaacatgggtcatgtagaggaaaaattacgaaggcagggaaagtagtggaaagagaaaggtctttacatggctaggacttttttttttcagataacagcttccactccacttccatcctcatccctcccatacacccaaatcccaatctgggtgcatacagtaaaatcttaaatatgcacactgagaagcaagtgcaatctagttatctgaaagttcatacaaacgcttctcaatcttccacccaaacattacacaagtgaaatgacaaaatgggttgcctcccactctctcccacacgtttttctataggaacataagtgtttagataactgaataggatcttgatgggaaatttaagcttcttaagaattcagtgaaagataaatgtggttttattaatacatacatacgcccaaaccgtagacatacagttcagttctaaaataaagagacttacataatgtgtgccaagaacaaagggaaagacaaggaacaaggcaagaagatataaattttggtaatgacttagatcctataatgcaacacctgcacaaagggaagctaataccttgattccacaaggtttaacctcctcctccccctcacctgcccattccaaggttttcctaaccctatggctgcagctttcactgcctaatgactccccttaatgggagaatatttggaagccagaaaggaattcgctgaggtcactcaagggtagtggaattacacatgtcatataaaatgctcttgctaaattgatgctagaaaaacggaatggcaaaaccttcacccaaaccctactgggaacgtgaagttaatggagtgtgctcatctgttagtgcaaactctcgggttacaattttctaaatcctatagtcctcttagaaatgataagggatctcagctgagaaaagcaatgtagcttattcctatttgggatcccttaatccaggttgaggggagggggtaagggggttggaatgaaatagaaagaattcgccagacaactgaagttaatagctgtcctgtacattatcaacaaggagaaaacttcacttaggtaaacttacagagatcttggctgtcaagaccctcatatcccaccccaggaagttattgaaaatagctcttctccctccaggctttactgctgatgaatttgtgggttataatggtaactcacatgtagggcatttgaccatgtatgaagtgattttcattcacgtagacctcatttgattgttccaaaaattcttgaggtgagtgtttatgacctaatttttaaagatggggaagatgagattcagagaaacttagcatcacacagctactaaatggatgagctaagacttgaacccacaccatgactttccacctcaaagctcatgcatttttccactcaatcaggttactcccttccaccaaaccaggccaactttcattgtcccctacaccactatccttctagatatgtgaatcaaattcctgagagtctgtttttacacctagtccctcatgatctcccttgccccatgcatcatccactcctttcgatttcacctctctaaaatagaaatgaaatccatccacttctcttcatctctaccaccacgatattagtacaagcagatattatttttgctttccaaggctcctgtttggttcacctacgttgactctgatggccctccaatctgctctactattttgatgcaaaagtaatcatggtttttgtaattacttttaactgcaaaaaccgcgattacttttgcaacaacctaatattttccaggttgctgccaatgtgaacttttcaaaagaccaatgtcatcccttgctgaaaactccctcatagagtctggccatttcctacccctgaaaacacactgcctcaagtcctttctgtccagctctcagctcaagcaatcctttctcagggaaattttctctgcctttctctgtagcagatcagctacatcctcttagtacaatcacatggcaacatatacctccattttatagcttttattccaggtgaacctttactcatgtctgtgtgatatttcatcaatgtttgtctcctacacttgactgttatttacttgaatgcaggttccactttagccttagcacacaggatgatgcctggttcagagaaagcatttgacaaatattattgaacaaatgtaaagcttctctttcttctttttctctttttcctgccctctctccattcctctactctcatccttatccctttccttgtcccatcttcatgggactttgctctcttacttagtcttaattggaaagaaatccatgacaaagcagtaaatatggcaactacaaatgttgttctccctaaagtcatttgatttcaactaggagactcttgatgccttaaaagacaacaaaatcattctctaatgctgatgttttagtcattctcatgagatggggaagatacaccctatttcatgagttctctggggaaattctttcccagtttaacccagccgatattgggaggtatcttacatttgttgctgctcaggctgcagttgtgatataattgtcaatgcctgcccatgaactctcttgatcatagtagttcttactgttgtcagttcatttgagctacaggcattattttaaaacaagccttgcctgttaggagaagagaagttgcacacctggtaaaaccactcaaagaaaaaggaaggaggaaagattcctgctccccccgtcccccccaccccgcccaccagccagagagagagagagagagagagagattgagagagagatcctctcaaggctcaggtggtactggggcagaaagttgtccggacagatacccaggagactatggaccccaccaagcgcgctggttcttaatgcatttgtaggcatatgtttaaagtgttaaataattagctcactgagatgtgtagtgacttgatgggcattccttgggttatgaatggacaactgcattctcttgtaggcccatttgtggaaagaatatagtcttgatcatcaccttctagtagaaatgcagagaaagaagctctttatttaaaaatgctgcattttggcccaaagtatgtcggcacggtgcagaaaagcacagatacaacgactcagttgaaaagttaaggcttcttaaaagtttatctcacctatatcttccattttatttatgcacagggggagacatatgatttttaaataatcagtctaaataatagtcagccaataactctctgttagagagttatttctatctaaaagagaataactctctgttagagagttatttcaataaatttagcataaaatatttaaatgctaagaaaacattgtgttatagattaattggaagaattttttctttcttagcgttgaatcttataatcgatcatatatgagattcaataaaaataagtcagaagtagggagccatttgatctacgctttgataaagctgccctgcttcctcattacacaaacaccatatggcccccacttgccttagcaaagagtgaactcttgccaagatatgttagcgcatgggatacattctctccacatcttggacgccacatcagattaaatgttacattctgctggggtagggtgttggtggatggggaattagagaaagagactggggtctgagggtaatctaggggggcaagtggcttttaccaatgaatttgctagcccagctcctcccgccattgctggtgaaaaagatttcaagctgttaaattaataagtatgaagtgagtatttttttgctttataaaatacggtacttttgagaaaacaccttaaaagggggaaatctacattgagaagacgtagattgctagagaagaaagaagtctttagagcaagggtgtcaaacacaaaaacctacaagggacaaacaggtaacaccaataaacagaggacatggtgtaagacattagaaggtatatcatgcttcactgaaacacaaattttaaatcattgagtgggcaaaattacataagggccaccagtgtgcatctgcttctacttcttcaacccctgaattgtttacttgacgatgtgcctaacttatccccacccatttcagatccagccaatatttactgattggcctcatgcccagcattgtgccaggtacgttcacagacatgaccattttcaatactcataaccgtccaatgaagtgtgtatttatgtctccatcgatagatgaggaaattgaatccctgagaagtttaaaatgtcttggccaaacccaccattcattgctctggaagaaacttgggaaacactaccattcttttgtttcttaacattgagccaaggatatcagttcgagtaaacttgttatctgttctctggtagtttatatgctgttttgttcccccaaggcaatacatgatgagtgtgtcagtacagatataaataactgcacaattagatactcagggggagaaataattttggttaaaataatcaaggcctctgttgcagaacaatagctataaataattcagccttttctggctcaggctctttgaccaaaattccaattctgtcacgtgttaaaactcaaactgtcaatttgaggaggctctgcttaatttcatttttgtctcaagtttagacaagtgaagagcaactcacaagagagtgtgagtatactcaactcacacacagttagaaccattctttatgcagcttcagctattatgtaccatgcatttctgaaaatgctatattccccaaagcacagcaatccatttttattttcttttaaaataaaaataacattaaatgaaccattgacattaatatttatagtaactcaatgtctttgaaaggttcattcacagaagattcccttatatgtgattgcaagcaattaatttaaaaacggaaatgtacttttacatttaactagaagtcatagtcctgactatcacctcaccagctaacctttcctcaaatataaatatattttaaattggttttactaatgccctaggtacttggaaaatcctactggtgcaaactcattattaattcatagtccccaattctaagccttacaggtatgaccttagaagtaatggcagctgctcttgcctactttataagaattgttaccgaaacttgtacgctaataatttccagtgattacaagccattataaaagctctcaagttacctagtactatggaaatagctcttctccatgtggcaccccaggaatacttgacaaccccaaagagagtggttttgaaaattacattaacaaaatataaactggcatcatccaactctcagttatttatagatgctctgcagggagaatcaagtggtccttcctctataagcacaccaagtttattggcatctacctggcattatctgacatggagatcatctggtcagtgaaagcatgaatatcttgacgtatcagttacttgttcattgcccaccagtgttttgtggccaccagttgggaagctctgatttagagaacgattagcaaaagagtgagtgatcaagtaagtttgcagcaaatcatgtttcacatcttgcaccattcaggtaatgagatttctctttgcagaaatgctatccattgcatgaagacttggtttaaattcatctgtctcttatatacccatttttcctccagagtacttagcataggacttcaaaaggcactcaataaatatttgctgaatgaatgtaacaggaattaataatgcaaaaaatgtttttgaaagataatcgatgtcaaatggtaggcagaggaagccagagaaagttcaccagtgatagaaatgctgtgtacaaatttggtacagtgcccaagaaaaggatttgaatttaacaaataacctttaaagccaggttcttttatgtccatcgcccctggactaagccatattagtggtgggagaatcccagccaaacaaaccctgatagcagtttgagaaagggaagtataagcaataaccaaatgttagaaaggattccatgaagcactttgccatcagttgttcaggaaacttctaagaatagaatagcacacacacatacacacattatagaacacatcattaaattctttataaaataaagaggacaaactggataacatgtagagggccttaacactctcatgattgcatgagcccccaggcccaagttaatacagtgttggggtattttgactggtttgatcaatattctgggcctagattgtcaaaggcagtttcctaactttagcacatcatgacagagaaattgatgcaatctgcaccatatatggaggtaaactgatgaagctatgtgatccagaaataaccttccagggatcagctcaggccagccacagcctgatggcccatgtgccaagaggggttaacagctgggtatgtctgcaacccactcatcatttaccagtgctctgaggtccatccattgagaagctttgttttaaagaatgtttctcaaaatgatcagcctagaaatgagccatcaagtaagtttgcagcaaaccatacttcatatggtgcacactatacttctctcagggagtcaaaacacgtattaataaatgaacatattaaggctctgagaagacctatttcccattgtttgtttgtttttgtccagtattttccaacctcttttaaccagggcacctactaacatcttgcagatctacggaggctgccgattggttaaaccctccatgcaagcacgcagtactgtgacttgaaaagggtcaatgcaacaatataggtcctaactgtctttaattggaggattagttcagacactggaaaaactttaatctttaagaaggaatcctcctggaactttgttaatactaaagtgttaaataccataaacaatattattacccccaaacaggctgctgaggagccggggatgagtagattctagccgtgagactcccagtaatctgcagtaattcatatgccactggcaaggataattctaaacatgagatccaaaaaccctatgcatacaccgcccccttgccctccttaccccaggagacttatctgtctttctggttatatattcccttggctgttagtgtaattagtgtataataactatgtacatatcaactcacaggaaaaacggcagacgtgctggctgatttggcttggggccatctcatcagcagggtgagaaaacctggtattaaaccatctgttattaactgtatattctaaaacagtgttttgtgtctcctgggttgctgactcccatcgacagcaacagaatgtcaagactcatatttttctgagcagcactgaaaagataaactttaaaacatttgcattgtcccttctgttctgcggcttgtgctattaagaattttatttactaaagtgtctattgtattatacacggtgcttttctatgtttcattctcacagaggtgaacaagtttcatttaaactgtgtccttgcgaaagttatgctttctagagtcaaagatcctagagaaaattggccatagcttttgtccttatgactaggcagttgccaatgcctgtttgaaatcaatagtctcactagggaatggactatgacttgcattttttaaaaacgtggtcattttctcaaatctccttgtttgcactgattacttttctttaaattaacttaagcaattaatttcataatatcagaaatctgaaattgagtctttgtgccacttgttgcagtcagtagcacaaacctgctcccaaaactcaggataaagtctgtatatgacagaaaacaacagtattcctttgaaagacgagcagtcaaatcattcaacacaattatccaagttaattcaactcaaaaaaccacatcaccatgaaaaaataaaaataaatttttttacctgattccaaatcacttttgacagctataaaaaattgactttctttgcaaaagttttacctatgccccagaactcagctgaaacattttttttcctttcccagttgtctcttacaattggctgttcccaagtataattaaaatttccctgcaagtctgttaaacactttcacatttccatgtttaattacattcagattgagatttttgtacacatatagaatatagccagattttaactcaattgaccacaatacctttgacataaagcctttattcaccgttctcgccatatatataaatagacatacgctccttgtcaaaacgcaagagcgagtttctttacattgtctagaacaaagaggccagctcggcttctatttttcctcagtgtctcagaaggtgtcctttattacatatgcaggatgcaaggattttgctgctgcgtgaatgaaaaatgataccttcagactgcctttttagtgacaaattacgcttttgcagaatatcacactgcctgtggttttaaaaaccccatttagatttactatcacttccttggggactcagccttcctcacaaagcaccccaaggctaatttccactgttttagagtgtaacaaagatgagaaagtttgctcatcacgacagtatagaaacgcttgcctaggaaaaacactctctggaatgtctaaagtgctaaaaatcattgcctctgtggattttcggtgtgcaaaacaggcagaaaaagttgtctggaggtattcgcaaagcattgtatttgttcaggaaggagctgtggggttagaggctgagcaacgcctcttactttgcttcctgggtgagagcagacaggcgtgccacttagcagaagcaagcagagagagagtggtaagactcaccagcttccccatttttcccaggatgggggtttttgttcctcagttctgatctggaagagacaaacctgtaggtccttcaagcaggctgggctggggcaagt

SEQ ID NO: 20 - protein, 667 aa, Homo sapiens
METLESELTCPICLELFEDPLLLPCAHSLCFNCAHRILVSHCATNESVESITAFQCPTCRHVITLSQRGLDGLKRNVTLQNIIDRFQKASVSGPNSPSETRRERAFDANTMTSAEKVLCQFCDQDPAQDAVKTCVTCEVSYCDECLKATHPNKKPFTGHRLIEPIPDSHIRGLMCLEHEDEKVNMYCVTDDQLICALCKLVGRHRDHQVAALSERYDKLKQNLESNLTNLIKRNTELETLLAKLIQTCQHVEVNASRQEAKLTEECDLLIEIIQQRRQIIGTKIKEGKVMRLRKLAQQIANCKQCIERSASLISQAEHSLKENDHARFLQTAKNITERVSMATASSQVLIPEINLNDTFDTFALDFSREKKLLECLDYLTAPNPPTIREELCTASYDTITVHWTSDDEFSVVSYELQYTIFTGQANVVSLCNSADSWMIVPNIKQNHYTVHGLQSGTKYIFMVKAINQAGSRSSEPGKLKTNSQPFKLDPKSAHRKLKVSHDNLTVERDESSSKKSHTPERFTSQGSYGVAGNVFIDSGRHYWEVVISGSTWYAIGLAYKSAPKHEWIGKNSASWALCRCNNNWVVRHNSKEIPIEPAPHLRRVGILLDYDNGSIAFYDALNSIHLYTFDVAFAQPVCPTFTVWNKCLTIITGLPIPDHLDCTEQLP

SEQ ID NO: 21 - DNA, 6093 bp, Homo sapiens
tcgaagaggctagtttattgaggtttggaaggtcagggggctcagagtggaggagagaagtgttagagttcctcttcctcagggtctttgcaagcaggcacgtgtagacatggtcgtttctcctccaccaccagcttctgcccttgtagctcctcacaccgtggcagcggtctcccccagaaggtcacgttcttctcgccctgaccttcgaccatggaaacggtgggcctgaggcattaggggtggggaggaacggaagggagaatctcagggaaggcaagaatgcattcaattcttattgagtgcctgctatatgccgagggctactttttttttttttttttttccttttttttttttgaggcagggtctcactctgttgcccaggctgcagtgcagtggcacaatcatagctcactgcagcctcaatctcctgggctcaagtgatgctcctgcctcagcctcccaaagtgttgctgggattacaggcgtgagccactgtgcctggcctcccaacactactttttagctataggatattgggcaatttctttagcttctctgtgcctcggtttccctcatctgcaaaatgagaatggtaggaatagtaatattaatactcacctcacggggttgaatgaggataaatgagttaattcaggtaaagtgctcagagcagtgcctggcacacagcaagtgctcaataaatgctggtgaatgttacttgttggcatgagctactttcttttacctccgaaatatataccctttatatctctttccactgcctccaggaaaaaacccaatgccttgtcctgacattcaaggccttattgttgggcccaaatccctgccccaagccaatctctctctctgtctcctccactttattcaagctcagtccctgtccagaaaggtctttacctgggttatttgtcccactaggaaagccctccattcactcccatcccagttctctcaattgcttcttcctccactcagtctctcgctcactcaagtcctttgtgcctccattcaacacctctaatcttcaggccccactctaaccccctcagccgggagatcccttcccagatggcagcccttccacgagctgggaatagttcacttaatctagtagcttgatgtatgtggaaggaagaaaagggatgaacattttaaccctctctaacacctgggcccctctggcacctggaaacacttatagcggctaatcacctagctccaaggctccgttcacagtcttgatgccaggaatgcctttcccaacccctacctgccctgggaggcccagtcagcttcctggacctaggttgaggtggcagcacctgttgcatgcaccagctgttcctcatatgcctcctgtcaggggcttgctcagctgggtcccttggaggatccacaggatctgggctgtgtgtatctgcaactgttgctgaaaaagccttggagtgccttggctcagtgagatgctgacaaagtggatggaggcatgagtgactgtgggaggcaggcagtgaatggaggcctgagtgatggcagctaaaagcatgggtaactgaaggtcggagtcaatgacacatgaaggactaagtggatgagtgactgaacaggtgactgaggggcacagaggctacgaattatcctccaagaacttctttctcatcttcttagtttctccccacttcctgcagctgggaggtggcactcggcaaggcagataccttagattcagcagtggaaaccctggtttcctggggtagccgactctcccgcctgtaatataatgaccccctcccaggcatactttgccctctcactcacgggtacttggggagcaagggtgtgcagaggcgctggcgggcacgggtaggattaggtccacaggggggcatgcacagcccccaggtactccactctgaccatgatcctttcactgcaatgaggggtaggggtcacagagtcagaactggaggtcttggtgggaaagtgagagggaggctgcagagacgtgaggtccacagcagagagttggaaaccccttatcctgcatgggccaccccaccctcagagcacagtctgtgggacactcacaggggcagtgctggatgctgtagcagtgccggatatcctgctgttgcccggcacatcgatgtccgtcaaacttgcggcccctgcaggtcctcccgcgtgactgctggcccgggatttcttgacagctgatggacttcatgttccgtcggatacaggggctccactccccccacgagtcccactccccatccactgcagagacagggcaacaggggattggaccaaagcagggaatcagcaagggggttcagaggaaggaatgagggcggtaggagggagtagaggtgatcagatgtgtgaatgggggaccaggggtggaaacaaggtatcagggccaggaaaggaggaatcagagacaggaacaaggcctcagcagcaggagctgggcagcagagaagggcaagggggacttaggcatgcaaatcgtgaaccctgagatgctgaccagggcagggcacagctgtgttgcagatgtgggtccgggtggcatcgccagcacagaaggggcccccatgctggggcacagggtgattgcacgtccgttgttccatggtctggcccaggccacaggtcacagggcaggggctcacagggccccaaggcccccagcccccagccactgttggaggaggaaagggagtgaggagaaaggcctcctcaatccttcctctcagcccctagacccttgaagcagactgtccccaaatgaagggctgcatggtcacatggcctaggaactctagaaatggcagagcatctctgccctcaatcaagagccccaccagcaacatcagcagcctcatcctggtgtacctgggcagggtggcaggccggtgcacctccgctgctcgtaggctagccccgggcagggcttcccaggaggtttctgggagggctcaggtgcagaacacttgcggcttcgtgtctccttaggttcgtggggtccaccgtggcaggaggctgagcagggggtccaggggccccaggtggcccaggccccgtgtgctgtggtggggtgggaggtggagggatgcaggtgtggtcatgcatgctaaagtcctctcagcctggcagttccctgctgtaaccccgcagacccacgctgggtgcacccatcagcatcctgtggcttccctcactcactggggcagacctgctgggtgtcacaggcctctgattcctgtgcctgtcctgggcagtggcccccacacttgggagcagggtgattacaggctcgcctgcgggtccgggtccctttggagcaggtgacagagcaaggctcccagggcccccagccagaccagccgcccatctctgtgggagagaagagagggtaatgggatggaggtggggtgtcattcagggctctttgcttccttgagtgccccacatgagctaatcctgtccttatatcctctgccaccattctgggcccaccatccccgctcaccgggcctgccgcagcaaccttcacatgggtgcctccgcttcccctctcaccctcaccgtgcacagtctgttctcctcccaaccccagtcagatcacgttcctcctctgcccacagtccaaattactcagatgaaaagccaacgtcctctctgtggcccccaggcaatggaccctcctcacctctctgacctcacctcccaccactctcctccttaggtccttacaaacactggggacgggcccactctgaggacctctgtaccgatcgttcccaccagtgctgggtgacagggagtgcttgcccgccttgctcatcctcctcaccaggacagcactgctggtcctcacaggcctggagctgccactccagggtcccaggtgccacctttccagagcactgcccattccagcccacacagcgccggtaccgcagctgggagccctcagagcacgtcaccgaacagggggcccatgtggaccacagggaccatcgtggggacctgtggagaagagcacacacatcccatcctggcatgagctaacaagaatggcatgtgggactccagagtgtgggcagacacgaagggttgctaggcaagtgcgtgtgcgatggattgataagtccttaccttttagggatattgggatactgatgggaagcagtggatatacaataagtgcttgataatgtcatttaccttcacaatcaggcatctggagttaccattggaaggctgcatggccaacaccaggtccgcagtaagcaaaggtaaggactagaaaccaagggctgctgtcagaaacccaccagatcaccacactacacggtagtaggtaaatagaaagtgcttaataaacctgagccatcatccctatgacctcagaggcctcctcagaaataaccccagatctatccccaacccactgcatagccctaggtatgctgttcatgccaaatagatgtgatgaactgttgacatgacttggggcccagagctgccctcaaaaatccccaagctccccatgcccacggtgtatctgggatatatagtaaacaagtagaaaacaggtctggcatacggtaagggctcaatccatgcaagctggaaatcatgatcaggagactagagctaccctcagaaatcctcaagctcatctcccaaccctgccatgcagctggtatacagggagtgctcaatgaatgtgaagtgtcatcataattaggggcctagagctgccctttgaattccccaaactttcccgcccccacagtgtgtccatatacagtaagcactcaataaacatgagctgtcatcaaaattagggaaataccaagctgcaccccacctgcaatgcttccagtgtgcaggaggtgctcaatatgtgtgagctatgtcagtggttctcaatcaggggtgattttgacccccaggggacatttggcaatgtctgctgacatgtttggttgtcacagctggtggggagaattgctactggcatctagtggaaggctaggggtgttacaaaacatcccacaatacacaggtaagcaatcccctcccccagccaagaatttccagccccaaatgtcaatagtaacaaggttgagaaaccctgaggtatggtcacgatcagggcctcagggccacccttggaagtcccagagaaagaaagtgcccagttttgggtgacccccacagacagtccttccctcccccccatcccccaccccaggctccccctaacctgcaaggctgacagagcccaccactacgtttctggtaggcaaaggcagtgttgagacagcagtcttccacgctgacaccaccccccaggaggcccttgcacttgccggaggattcttcatactgggtgaagcagagcacggggtctgagcctgtaacagggccaggggatgggtgggtggggctcggtcagggatgtggtgggcctggacacccctggggccagctgggccctcaccccctcacctgtggctggcagggtgagcagcaggagcagcggcggcagcaacaatcgaggggcctgcgctccctctgtgatcatgttgagtactgccccctgcacctctaccagagaggaggtcccgctttatctgggttgataggctcctggaatcagcagggaaagaggaacctagaggcaggaggaactgggagggcatcctgctttgaccccaccctgtcccctctgcctccttctctactctcccctccccatttcctgtcttactcttggtcttgttctgtttgttactatatccccagcacctcgcgctcctcccagcaacctcacagtgttcaatagaagctcctaggacaaattctcacccagaggaaatggagcataggagcgtgcagcaacttcctagccgtgtgaccttgggtgagtcacttaacacccctgagcctcagtttccctatgtggaaaatgcataatctctaacataatgacggggtcaacctcgtgggggtgttgaaccagggtgaagtgagtgtgcggtgctc

SEQ ID NO: 22 - protein, 469 aa, Homo sapiens
MITEGAQAPRLLLPPLLLLLTLPATGSDPVLCFTQYEESSGKCKGLLGGGVSVEDCCLNTAFAYQKRSGGLCQPCRSPRWSLWSTWAPCSVTCSEGSQLRYRRCVGWNGQCSGKVAPGTLEWQLQACEDQQCCPEMGGWSGWGPWEPCSVTCSKGTRTRRRACNHPAPKCGGHCPGQAQESEACDTQQVCPTHGAWATWGPWTPCSASCHGGPHEPKETRSRKCSAPEPSQKPPGKPCPGLAYEQRRCTGLPPCPVAGGWGPWGPVSPCPVTCGLGQTMEQRTCNHPVPQHGGPFCAGDATRTHICNTAVPCPVDGEWDSWGEWSPCIRRNMKSISCQEIPGQQSRGRTCRGRKFDGHRCAGQQQDIRHCYSIQHCPLKGSWSEWSTWGLCMPPCGPNPTRARQRLCTPLLPKYPPTVSMVEGQGEKNVTFWGRPLPRCEELQGQKLVVEEKRPCLHVPACKDPEEEEL

What is claimed is:

1. A method of sequencing a large fragment of DNA, the method comprising:
a) isolating genomic DNA from a biological sample;
b) hybridizing the genomic DNA with a set of probes to form genomic DNA-probe complexes, wherein the set of probes targets sequences across the large fragment of DNA at intervals;
c) purifying the genomic DNA from the complexes with affinity chromatography;
d) shearing the genomic DNA to produce small fragments of DNA, wherein the small fragments of DNA comprise coding and non-coding sequences from the large fragment of DNA; and
e) sequencing the small fragments of DNA with Next Generation Sequencing (NGS) to obtain the sequence of the large fragment of DNA.

2. The method of claim 1, wherein the intervals across the large fragment of DNA are about 500 bp to about 5,000 bp.

3. The method of claim 2, wherein the intervals are regular intervals, the regular intervals being about 1,000 bp to about 2,000 bp.

4. The method of claim 3, wherein the regular intervals across the large fragment of DNA are about 2,000 bp.

5. The method of claim 1, wherein the large fragment of DNA is about 2,000 bp to about 50,000 bp in length.

6. The method of claim 1, wherein the set of probes comprises probes of about 80 bp to about 120 bp in length.

7. The method of claim 1, wherein the large fragment of DNA includes at least one gene.

8. The method of claim 7, wherein the at least one gene is associated with a neuromuscular disease (NMD).

9. The method of claim 1, wherein the large fragment of DNA includes at least fifty genes.

10. The method of claim 1, wherein the set of probes comprise an affinity tag selected from the group consisting of biotin and streptavidin.

11. The method of claim 1, wherein shearing the genomic DNA comprises sonication, needle shearing, restriction digest, acoustic shearing, nebulization, point-sink shearing, or passage through a pressure cell of the genomic DNA.

12. The method of claim 11, wherein shearing the genomic DNA comprises sonication.

13. The method of claim 1, further comprising performing end-repair of the genomic DNA after isolating the genomic DNA, wherein the end-repair prevents overhanging, single-stranded DNA from interfering with the hybridizing of the genomic DNA with the set of probes.

14. The method of claim 1, wherein the NGS comprises ion semiconductor sequencing, cycle sequencing, pyrosequencing, or sequencing using γ-phosphate-labeled nucleotides.

15. A method of sequencing a large fragment of DNA, the method comprising:
a) isolating genomic DNA from a biological sample;
b) hybridizing the genomic DNA with a first set of probes to form genomic DNA-probe complexes with a portion of the genomic DNA encoding a pseudogene, wherein the set of probes targets sequences across the pseudogene at intervals;
c) removing the portion of the genomic DNA encoding the pseudogene with affinity chromatography;
d) hybridizing the genomic DNA with a second set of probes to form genomic DNA-probe complexes, wherein the second set of probes targets sequences across the large fragment of DNA at intervals;
e) purifying the genomic DNA from the complexes with affinity chromatography;
f) shearing the genomic DNA to produce small fragments of DNA, wherein the small fragments of DNA comprise coding and non-coding sequences from the large fragment of DNA; and
g) sequencing the small fragments of DNA with Next Generation Sequencing (NGS) to obtain the sequence of the large fragment of DNA.

16. The method of claim 15, wherein the intervals across the pseudogene and/or the large fragment of DNA are about 500 bp to about 5,000 bp.

17. The method of claim 15, wherein the intervals across the pseudogene and/or the large fragment of DNA are regular intervals of about 2,000 bp.

18. The method of claim 15, wherein the large fragment of DNA is about 2,000 bp to about 50,000 bp in length.

19. The method of claim 15, wherein the large fragment of DNA includes at least one gene.

20. The method of claim 19, wherein the pseudogene and the at least one gene share at least 80% sequence homology.

21. A method of diagnosing a neuromuscular disease (NMD) in a subject, the method comprising:
a) obtaining a biological sample from the subject;
b) isolating genomic DNA from the biological sample;
c) sequencing in the genomic DNA at least one gene selected from the group consisting of SCML2, CHRND, OFD1, DYNC1H1, COL6A3, EMD, ARHGAP4, FLNA, MID1IP1, MID1, and CFP; and
d) diagnosing NMD in the subject if there is a mutation in the at least one gene.

22. The method of claim 21, wherein the mutation is selected from the group consisting of ASN76SER in SCML2, MET1VAL start loss in SCML2, ASP161ASN in CHRND, a single DNA base pair frameshift deletion at genomic position chromosome 2 position 233398958 in CHRND, GLU958LYS in OFD1, TRP1208LEU in DYNC1H1, LYS2483GLU in COL6A3, a DNA substitution of G to T at the splice junction of EMD at genomic position chromosome X position 153608155, PRO635LEU in ARHGAP4, VAL584LEU in FLNA, ARG655HIS in FLNA, ASP51ASN in MID1IP1, PRO667LEU in MID1, and CYS337TYR in CFP.
